(19) United States
(12) Patent Application Publication
(10) Pub. No.: US 2007/0298489 A1
(43) Pub. Date: Dec. 27, 2007

(54) Novel human membrane proteins and polynucleotides encoding the same

(76) Inventors: Alejandro Abuin, The Woodlands, TX (US); Michael Burnett, Houston, TX (US); Gregory Donoho, Indianapolis, IN (US); Carl Johan Friddle, The Woodlands, TX (US); Glenn Friedrich, Houston, TX (US); Brenda Gerhardt, Spring, TX (US); Erin Hilbun, Denton, TX (US); Yi Hu, Spring, TX (US); Brian Mathur, Nashville, TN (US); Michael C. Nehls, Stockdorf (DE); Boris Nepomnichy, Dickinson, TX (US); Arthur T. Sands, The Woodlands, TX (US); John Scoville, Pearland, TX (US); C. Alexander Turner JR., The Woodlands, TX (US); D. Wade Walke, Spring, TX (US); Xiaoming Wang, Downers Grove, IL (US); Frank Wattler, Munich (DE); Nathaniel L. Wilganowski, Houston, TX (US); Brian Zambrowicz, The Woodlands, TX (US)

Correspondence Address: LEXICON PHARMACEUTICALS, INC., 8800 TECHNOLOGY FOREST PLACE, THE WOODLANDS, TX, 77381-1160, US

(21) Appl. No.: 11/244,415

(22) Filed: Oct. 5, 2005

Related U.S. Application Data
(63) Continuation-in-part of application No. 10/926,793, filed on Aug. 26, 2004, now abandoned.
Application No. 10/926,793 is a continuation of application No. 10/307,545, filed on Nov. 27, 2002, now abandoned.
Application No. 10/926,793 is a continuation of application No. 10/305,786, filed on Nov. 26, 2002, now abandoned.
Application No. 10/307,545 is a continuation of application No. 09/658,284, filed on Sep. 8, 2000, now abandoned.
Application No. 10/305,786 is a continuation of application No. 09/658,284, filed on Sep. 8, 2000, now abandoned.
(63) Continuation-in-part of application No. 09/658,283, filed on Sep. 8, 2000, now abandoned.
(63) Continuation-in-part of application No. 09/733,387, filed on Dec. 7, 2000, now abandoned.
(63) Continuation-in-part of application No. 11/095,093, filed on Mar. 31, 2005.
Application No. 11/095,093 is a continuation of application No. 09/755,017, filed on Jan. 5, 2001, now abandoned.
(63) Continuation-in-part of application No. 10/870,450, filed on Jun. 16, 2004, now abandoned.
Application No. 10/870,450 is a continuation of application No. 09/775,181, filed on Feb. 1, 2001, now abandoned.
(63) Continuation-in-part of application No. 09/783,669, filed on Feb. 14, 2001, now abandoned.
(63) Continuation-in-part of application No. 10/885,493, filed on Jul. 6, 2004, now abandoned.
Application No. 10/885,493 is a continuation of application No. 09/819,946, filed on Mar. 28, 2001, now abandoned.
(63) Continuation-in-part of application No. 11/022,049, filed on Dec. 22, 2004, now abandoned.
Application No. 11/022,049 is a continuation of application No. 09/878,764, filed on Jun. 11, 2001, now abandoned.
(63) Continuation-in-part of application No. 11/025,585, filed on Dec. 29, 2004, now abandoned.
Application No. 11/025,585 is a continuation of application No. 09/899,513, filed on Jul. 5, 2001, now abandoned.
(63) Continuation-in-part of application No. 09/916,122, filed on Jul. 26, 2001, now abandoned.
(63) Continuation-in-part of application No. 10/894,354, filed on Jul. 19, 2004, now abandoned.
Application No. 10/894,354 is a continuation of application No. 09/934,451, filed on Aug. 21, 2001, now abandoned.
(63) Continuation-in-part of application No. 09/975,308, filed on Oct. 11, 2001, now abandoned.
(63) Continuation-in-part of application No. 10/036,328, filed on Oct. 29, 2001, now abandoned.
(63) Continuation-in-part of application No. 10/008,574, filed on Oct. 26, 2001, now abandoned.
(63) Continuation-in-part of application No. 11/028,510, filed on Jan. 3, 2005, now abandoned.
Application No. 11/028,510 is a continuation of application No. 10/020,095, filed on Dec. 14, 2001, now abandoned.
(63) Continuation-in-part of application No. 10/990,309, filed on Nov. 16, 2004, now abandoned.
Application No. 10/990,309 is a continuation of application No. 10/390,567, filed on Mar. 17, 2003, now abandoned.
Application No. 10/390,567 is a continuation of application No. 10/042,810, filed on Jan. 9, 2002, now Pat. No. 6,570,003.
(63) Continuation-in-part of application No. 10/158,221, filed on May 29, 2002, now abandoned.
(63) Continuation-in-part of application No. 10/391,074, filed on Mar. 17, 2003, now abandoned.
Application No. 10/391,074 is a continuation of application No. 09/477,620, filed on Jan. 4, 2000, now abandoned.
(63) Continuation-in-part of application No. 10/443,530, filed on May 22, 2003, now abandoned.
Application No. 10/443,530 is a continuation of application No. 09/689,597, filed on Oct. 13, 2000, now abandoned.
(63) Continuation-in-part of application No. 10/394,962, filed on Mar. 21, 2003, now abandoned.
Application No. 10/394,962 is a continuation of application No. 09/843,164, filed on Apr. 27, 2001, now abandoned.
(63) Continuation-in-part of application No. 10/435,341, filed on May 9, 2003, now abandoned.
Application No. 10/435,341 is a continuation of application No. 09/852,909, filed on May 11, 2001, now abandoned.
(60) Provisional application No. 60/152,747, filed on Sep. 8, 1999.
(60) Provisional application No. 60/152,747, filed on Sep. 8, 1999.
(60) Provisional application No. 60/165,510, filed on Nov. 15, 1999.
(60) Provisional application No. 60/153,366, filed on Sep. 10, 1999.
(60) Provisional application No. 60/169,427, filed on Dec. 7, 1999.
(60) Provisional application No. 60/175,764, filed on Jan. 12, 2000.
(60) Provisional application No. 60/180,414, filed on Feb. 4, 2000.
(60) Provisional application No. 60/183,581, filed on Feb. 18, 2000.
(60) Provisional application No. 60/192,978, filed on Mar. 28, 2000.
(60) Provisional application No. 60/210,608, filed on Jun. 9, 2000.
(60) Provisional application No. 60/217,600, filed on Jul. 11, 2000.
(60) Provisional application No. 60/221,012, filed on Jul. 27, 2000.
(60) Provisional application No. 60/227,105, filed on Aug. 22, 2000.
(60) Provisional application No. 60/239,592, filed on Oct. 11, 2000.
(60) Provisional application No. 60/244,285, filed on Oct. 30, 2000.
(60) Provisional application No. 60/244,291, filed on Oct. 30, 2000.
(60) Provisional application No. 60/243,948, filed on Oct. 27, 2000.
(60) Provisional application No. 60/255,566, filed on Dec. 14, 2000.
(60) Provisional application No. 60/261,624, filed on Jan. 9, 2001.
(60) Provisional application No. 60/295,089, filed on May 29, 2001.
(60) Provisional application No. 60/114,666, filed on Jan. 4, 1999.
(60) Provisional application No. 60/115,828, filed on Jan. 14, 1999.
(60) Provisional application No. 60/159,150, filed on Oct. 13, 1999.
(60) Provisional application No. 60/199,950, filed on Apr. 27, 2000.
(60) Provisional application No. 60/203,875, filed on May 12, 2000.
(60) Provisional application No. 60/207,932, filed on May 30, 2000.

(51) Int. Cl. C12N 15/00; C07H 21/04; C07K 14/00

(52) U.S. Cl. 435/320.1; 530/350; 536/23.5

(57) ABSTRACT

Novel human polynucleotide and polypeptide sequences are disclosed that can be used in therapeutic, diagnostic, and pharmacogenomic applications.

### 1.0 CROSS-REFERENCE TO RELATED APPLICATIONS

[0001] The present application is a continuation-in-part of: co-pending U.S. application Ser. No. 10/926,793, filed on Aug. 26, 2004, which is a continuation of U.S. application Ser. Nos. 10/307,545, filed on Nov. 27, 2002, abandoned, and 10/305,786, filed on Nov. 26, 2002, abandoned, both of which are continuations of U.S. application Ser. No. 09/658,284, filed on Sep. 8, 2000, abandoned, which claims the benefit of U.S. Provisional Application No. 60/152,747, filed on Sep. 8, 1999; co-pending U.S. application Ser. No. 09/658,283, filed on Sep. 8, 2000, which claims the benefit of U.S. Provisional Application Nos. 60/165,510, filed on Nov. 15, 1999, and 60/153,366, filed on Sep. 10, 1999; co-pending U.S. application Ser. No. 09/733,387, filed on Dec. 7, 2000, which claims the benefit of U.S. Provisional Application No. 60/169,427, filed on Dec. 7, 1999; co-pending U.S. application Ser. No. 11/095,093, filed on Mar. 31, 2005, which is a continuation of U.S. application Ser. No. 09/755,017, filed on Jan. 5, 2001, abandoned, which claims the benefit of U.S. Provisional Application No. 60/175,764, filed on Jan. 12, 2000; co-pending U.S. application ser. No. 10/870,450, filed on Jun. 16, 2004, which is a continuation of U.S. application Ser. No. 09/775,181, filed on Feb. 1, 2001, abandoned, which claims the benefit of U.S. Provisional Application No. 60/180,414, filed on Feb. 4, 2000; co-pending U.S. application Ser. No. 09/783,669, filed on Feb. 14, 2001, which claims the benefit of U.S. Provisional Application No. 60/183,581, filed on Feb. 18, 2000; co-pending U.S. application Ser. No. 10/885,493, filed on Jul. 6, 2004, which is a continuation of U.S. application Ser. No. 09/819,946, filed on Mar. 28, 2001, abandoned, which claims the benefit of U.S. Provisional Application No. 60/192,978, filed on Mar. 28, 2000; co-pending U.S. application Ser. No. 11/022,049, filed on Dec. 22, 2004, which is a continuation of U.S. application Ser. No. 09/878,764, filed on Jun. 11, 2001, abandoned, which claims the benefit of U.S. Provisional Application No. 60/210,608, filed on Jun. 9, 2000; co-pending U.S. application Ser. No. 11/025,585, filed on Dec. 29, 2004, which is a continuation of U.S. application Ser. No. 09/899,513, filed on Jul. 5, 2001, abandoned, which claims the benefit of U.S. Provisional Application No. 60/217,600, filed on Jul. 11, 2000; co-pending U.S. application Ser. No. 09/916,122, filed on Jul. 26, 2001, which claims the benefit of U.S. Provisional Application No. 60/221,012, filed on Jul. 27, 2000; co-pending U.S. application Ser. No. 10/894,354, filed on Jul. 19, 2004, which is a continuation of U.S. application Ser. No. 09/934,451, filed on Aug. 21, 2001, abandoned, which claims the benefit of U.S. Provisional Application No. 60/227,105, filed on Aug. 22, 2000; co-pending U.S. application Ser. No. 09/975,308, filed on Oct. 11, 2001, which claims the benefit of U.S. Provisional Application No. 60/239,592, filed on Oct. 11, 2000; co-pending U.S. application Ser. No. 10/036,328, filed on Oct. 29, 2001, which claims the benefit of U.S. Provisional Application No. 60/244,285, filed on Oct. 30, 2000; co-pending U.S. application Ser. No. 10/008,574, filed on Oct. 26, 2001, which claims the benefit of U.S. Provisional Application Nos. 60/244,291, filed on Oct. 30, 2000, and 60/243,948, filed on Oct. 27, 2000; co-pending U.S. application Ser. No. 11/028,510, filed on Jan. 3, 2005, which is a continuation of U.S. application Ser. No. 10/020,095, filed on Dec. 14, 2001, abandoned, which claims the benefit of U.S. Provisional Application No. 60/255,566, filed on Dec. 14, 2000; co-pending U.S. application Ser. No. 10/990,309, filed on Nov. 16, 2004, which is a continuation of U.S. application Ser. No. 10/390,567, filed on Mar. 17, 2003, abandoned, which is a continuation of U.S. application Ser. No. 10/042,810, filed on Jan. 9, 2002, which issued as U.S. Pat. No. 6,570,003 B1 on May 27, 2003, which claims the benefit of U.S. Provisional Application No. 60/261,624, filed on Jan. 9, 2001; co-pending U.S. application Ser. No. 10/158,221, filed on May 29, 2002, which claims the benefit of U.S. Provisional Application No. 60/295,089, filed on May 29, 2001; co-pending U.S. application Ser. No. 10/391,074, filed on Mar. 17, 2003, which is a continuation of U.S. application Ser. No. 09/477,620, filed on Jan. 4, 2000, abandoned, which claims the benefit of U.S. Provisional Application Nos. 60/114,666, filed on Jan. 4, 1999, and 60/115,828, filed Jan. 14, 1999; co-pending U.S. application Ser. No. 10/443,530, filed on May 22, 2003, which is a continuation of U.S. application Ser. No. 09/689,597, filed on Oct. 13, 2000, abandoned, which claims the benefit of U.S. Provisional Application No. 60/159,150, filed on Oct. 13, 1999; co-pending U.S. application Ser. No. 10/394,962, filed on Mar. 21, 2003, which is a continuation of U.S. application Ser. No. 09/843,164, filed on Apr. 26, 2001, abandoned, which claims the benefit of U.S. Provisional Application No. 60/199,950, filed on Apr. 27, 2000; and co-pending U.S. application Ser. No. 10/435,341, filed on May 9, 2003, which is a continuation of U.S. application Ser. No. 09/852,909, filed on May 11, 2001, abandoned, which claims the benefit of U.S. Provisional Application Nos. 60/203,875, filed on May 12, 2000, and 60/207,932, filed on May 30, 2000; each of which is herein incorporated by reference in its entirety.

### 2.0 CROSS-REFERENCE TO SEQUENCE LISTING SUBMITTED ON COMPACT DISC

[0002] The present application contains a Sequence Listing of SEQ ID NOS:1-257, in file “Seqlist.txt” (1,656,832 bytes), created on Oct. 5, 2005, submitted herewith on duplicate compact disc (Copy 1 and Copy 2), which is herein incorporated by reference in its entirety.

### 3.0 INTRODUCTION

[0003] The present invention relates to the discovery, identification, and characterization, of novel human polynucleotides that encode membrane proteins, membrane-associated proteins, secreted proteins, and receptors. The invention encompasses the described polynucleotides, host cell expression systems, the encoded proteins, fusion proteins, polypeptides and peptides, antibodies to the encoded proteins and peptides, and genetically engineered animals that lack the disclosed genes, or overexpress the disclosed genes, or antagonists and agonists of the proteins, and other compounds that modulate the expression or activity of the proteins encoded by the disclosed genes that can be used for diagnosis, drug screening, clinical trial monitoring, the treatment of physiological or behavioral disorders, and/or cosmetic or nutriceutical applications.

### 4.0 BACKGROUND OF THE INVENTION

[0004] In addition to providing the structural and mechanical scaffolding for cells and tissues, membrane proteins can also serve as recognition markers, mediate signal transduction, and can mediate or facilitate the passage of materials across the lipid bilayer. As such, membrane proteins are good drug targets, and soluble forms thereof can directly serve as therapeutics.

[0005] Alpha macroglobulins are large secreted glycoproteins present in vertebrate blood plasma that have been implicated in modulating protease activity, and a number of associated biological processes and anomalies.

[0006] Membrane receptor proteins can serve as integral components of cellular mechanisms for sensing their environment, and maintaining cellular homeostasis and function. Accordingly, membrane receptor proteins are often involved in transduction pathways that control cell physiology, chemical communication, and gene expression.

[0007] Sensory receptor proteins are typically membrane proteins that interact with ligands or stimuli and mediate signal transduction. As such, extracellular receptor proteins are good drug or chemical targets.

[0008] A particularly relevant class of membrane receptors are those typically characterized by the presence of 7 conserved transmembrane domains that are interconnected by nonconserved hydrophilic loops. Such, seven transmembrane receptors, or 7TM receptors, include a superfamily of receptors known as G protein-coupled receptors (GPCRs). GPCRs are typically involved in transduction pathways involving G proteins or PPG proteins. As such, the GPCR family includes many receptors that are known to serve as drug targets for therapeutic agents.

### 5.0 SUMMARY OF THE INVENTION

[0009] The present invention relates to the discovery, identification, and characterization of nucleotides that encode novel human membrane proteins, many of which are GPCRs, and the corresponding novel amino acid sequences. The GPCRs described for the first time herein are transmembrane proteins that span the cellular membrane and are involved in signal transduction after ligand binding. The described GPCRs have structural motifs found in the 7TM receptor family. Expression of the described membrane proteins can be detected in a variety of human cells.

[0010] The novel human sequences described herein encode membrane proteins of 371, 1250, 1221, 718, 1112, 1249, 1220, 717, 1111, 1250, 1221, 718, 1112, 541, 512, 8, 403, 1222, 1193, 690, 1084, 1221, 1192, 689, 1083, 1222, 1193, 690, 1084, 1192, 225, 508, 298, 359, 233, 162, 504, 294, 355, 229, 158, 521, 311, 372, 246, 175, 485, 275, 336, 210, 139, 549, 339, 400, 274, 203, 313, 1215, 599, 197, 270, 253, 202, 841, 763, 366, 234, 910, 598, 205, 1257, 1158, 324, 925, 300, 338, 298, 316, 307, 293, 357, 309, 310, 1210, 734, 1138, 662, 640, 578, 1445, 1428, 1248, 1278, 890, 898, 777, 775, 785, 783, 862, 860, 322, 552, 314, 314, 769, 296, 848, 481, 423, 560, 502, 241, 320, 994, 826, and 335 amino acids in length (see, respectively, SEQ ID NOS:2, 4, 6, 8, 10, 12, 14, 16, 18, 20, 22, 24, 26, 28, 30, 32, 34, 36, 38, 40, 42, 44, 46, 48, 50, 52, 54, 56, 58, 60, 63, 65, 67, 69, 71, 73, 75, 77, 79, 81, 83, 85, 87, 89, 91, 93, 95, 97, 99, 101, 103, 105, 107, 109, 111, 113, 116, 119, 121, 124, 126, 128, 130, 133, 135, 137, 139, 142, 144, 146, 149, 151, 154, 157, 159, 162, 164, 166, 169, 172, 175, 177, 180, 182, 184, 186, 188, 191, 193, 196, 198, 201, 203, 206, 208, 210, 212, 214, 216, 218, 220, 223, 225, 227, 229, 233, 235, 237, 239, 241, 243, 245, 247, 249, 252, 254, and 257). SEQ ID NOS:61, 114, 117, 122, 131, 140, 147, 152, 155, 160, 167, 170, 173, 178, 189, 194, 199, 204, 221, 230, 231, 250, and 255 describe open reading frames (ORFs) and flanking regions. The described GPCRs have multiple transmembrane regions (of about 20-30 amino acids) characteristic of 7TM proteins, as well as several predicted cytoplasmic domains.

[0011] As evidenced by the alternative 5′ regions and splice junctions of the open reading frames present in SEQ ID NOS:3-61, the transcription of these sequences can apparently initiate from one of several different promoters present within the genome. Depending on the promoter that is used, these proteins can have one of several distinct amino acid sequences at or near the amino terminus. An additional feature of SEQ ID NOS:3-61 is that the 7TM region of the protein is typically present at the C-terminal portion of the protein (for example, beginning at about amino acid 710 of SEQ ID NO:4), and thus these proteins incorporate a large upstream open reading frame that is substantially similar to a variety of other proteins, such as bone morphogenic protein and several different proteases. Given that, in lower organisms, ORFs encoding receptor ligands can be linked to the ORF encoding the cognate receptor, it is possible that the presently described upstream ORF encodes a product (or cleavage product) that can serve as a receptor ligand in the body. Accordingly, an additional embodiment of the present invention includes soluble protein products or ligands that are encoded by at least a portion of SEQ ID NOS:3-61.

[0012] The invention encompasses the nucleotides presented in the Sequence Listing, expression vectors that have been engineered to incorporate one or more of the nucleotides presented in the Sequence Listing, host cells expressing such nucleotides, the expression products of such nucleotides, and: (a) nucleotides that encode mammalian homologs of the described membrane proteins, including the specifically described human membrane proteins, and the human membrane protein gene products; (b) nucleotides that encode one or more portions of the described membrane proteins that correspond to functional domains, and the polypeptide products specified by such nucleotide sequences, including, but not limited to, the novel regions of the described extracellular domain(s) (ECD), transmembrane domain(s) (TM), and cytoplasmic domain(s) (CD) first disclosed herein; (c) isolated nucleotides that encode mutants, engineered or naturally occurring, of the described membrane proteins, in which all or a part of at least one of the domains is deleted or altered, and the polypeptide products specified by such nucleotide sequences, including, but not limited to, soluble receptors, in which all or a portion of a TM is deleted (in the case of the described 7TMs, a soluble product can be generated by engineering a protein to include only the region upstream from the first TM, such that all downstream TMs are deleted), and nonfunctional receptors, in which all or a portion of one or more of the CD(s) is deleted; (d) nucleotides that encode fusion proteins containing all or a portion of the coding region from one or more of the described membrane proteins, or one of its domains (e.g., an extracellular domain), fused to another peptide or polypeptide; and (e) therapeutic or diagnostic derivatives of the described polynucleotides, such as oligonucleotides, antisense polynucleotides, ribozymes, double stranded RNA (dsRNA), or gene therapy constructs, comprising one or more of the sequences first disclosed in the Sequence Listing.

[0013] The invention also encompasses agonists and antagonists of the described membrane proteins (including small molecules, large molecules, mutant forms of the described membrane proteins, or portions thereof, that compete with the native membrane protein, and antibodies), nucleotide sequences that can be used to inhibit (e.g., antisense and ribozyme molecules, and gene or regulatory sequence replacement constructs) or enhance (e.g., expression constructs that place the described sequence under the control of a strong promoter system) expression of the described membrane proteins, and transgenic animals that express one or more of the described membrane protein transgenes, or “knock-outs” that do not express a functional version of the described membrane proteins.

[0014] Additionally contemplated are “knock-out” embryonic stem (ES) cells that have been engineered using conventional methods (see, e.g., U.S. Pat. No. 6,924,146 B1). When the unique membrane protein sequences described in SEQ ID NOS:1-257 are “knocked-out” they provide a method of identifying phenotypic expression of the particular gene, as well as a method of assigning function to previously unknown genes. In addition, animals in which a homolog of the unique membrane protein sequences described in SEQ ID NOS:1-257 are “knocked-out” provide a unique source in which to elicit antibodies to homologous and orthologous proteins, which would have been previously viewed by the immune system as “self” and therefore would have failed to elicit significant antibody responses. Accordingly, an additional aspect of the present invention includes knockout cells and animals having genetically engineered mutations in the sequences encoding the presently described membrane proteins. Knock-out mice can be produced in several ways, one of which involves the use of mouse ES cell lines that contain gene trap mutations in a murine homolog of at least one of the described human membrane proteins. To these ends, gene trapped knockout ES cells have been generated in murine homologs of the described membrane proteins.

[0015] Additionally, the unique membrane protein sequences described in SEQ ID NOS:1-257 are useful for the identification of protein coding sequences, and mapping unique genes to one or more particular chromosome. These sequences identify actual, biologically relevant, exon splice junctions, as opposed to those that might have been predicted bioinformatically from genomic sequence alone. The sequences of the present invention are also useful as additional DNA markers for restriction fragment length polymorphism (RFLP) analysis, and in forensic biology.

[0016] Further, the present invention also relates to methods of using the described membrane protein nucleotide sequences and/or gene products for the identification of compounds that modulate, i.e., act as agonists or antagonists of, gene expression and/or gene product activity of the described membrane proteins. Such compounds can be used as therapeutic agents for the treatment of various symptomatic representations of biological disorders or imbalances.

### 6.0 BRIEF DESCRIPTION OF THE FIGURES

[0017] No Figures are required in the present invention.

### 7.0 DETAILED DESCRIPTION OF THE INVENTION

[0018] The human polynucleotide sequences described for the first time herein encode novel membrane proteins that are expressed in, inter alia, human cell lines, and: human hypothalamus, fetal brain, brain, and cerebellum cells, with less but detectable expression in human heart, esophagus, fetal liver, and colon cells (SEQ ID NOS:1-2); human placenta, lung, kidney, liver, pancreas, spinal cord, spleen, thymus, lymph node, adrenal gland, stomach, salivary gland, mammary gland, thyroid, heart, brain, testis, kidney, adipose, esophagus, rectum, pericardium, trachea, fetal liver, prostate, small intestine, and colon cells (SEQ ID NOS:3-61); human spleen, bone marrow, and adipose cells (SEQ ID NOS:62-114); human brain, cerebellum, spinal cord, thymus, spleen, bone marrow, liver, placenta, prostate, thyroid, testis, adrenal gland, stomach, small intestine, colon, esophagus, bladder, rectum, pericardium, and fetal lung cells (SEQ ID NOS:115-117); human fetal brain, brain, cerebellum, hypothalamus, and testis cells,(SEQ ID NOS:118-122); human spinal cord, kidney, hypothalamus, and particularly adrenal gland and heart cells (SEQ ID NOS:123-131); human testis and kidney cells (SEQ ID NOS:132-140); human pituitary, spinal cord, lymph node, trachea, kidney, prostate, testis, thyroid, salivary gland, small intestine, heart, uterus, placenta, mammary gland, adipose, esophagus, bladder, cervix, fetal lung, and fetal kidney cells (SEQ ID NOS:141-144); human lymph node, brain, adrenal gland, bone marrow, pituitary, placenta, prostate, thymus, thyroid, and kidney cells (SEQ ID NOS:145-147); human fetal brain, cerebellum, spinal cord, spleen, kidney, fetal liver, liver, prostate, testis, adrenal gland, skeletal muscle, uterus, adipose, esophagus, cervix, rectum, and pericardium cells (SEQ ID NOS:148-152); human pituitary, spleen, lymph node, trachea, liver, testis, heart, uterus, adipose, esophagus, cervix, rectum, pericardium, fetal kidney, and fetal lung cells (SEQ ID NOS:153-155); human kidney, fetal kidney, and fetal lung cells (SEQ ID NOS:156-160); human spinal cord, spleen, lymph node, lung, testis, skeletal muscle, placenta, cervix, fetal lung, and 6 week embryo cells (SEQ ID NOS:161-167); human fetal brain, spinal cord, spleen, lymph node, bone marrow, testis, thyroid, adrenal gland, stomach, small intestine, colon, skeletal muscle, uterus, mammary gland, fetal kidney, and adenocarcinoma cells (SEQ ID NOS:168-170); human lymph node, lung, fetal liver, testis, small intestine, skeletal muscle, uterus, and bladder cells (SEQ ID NOS:171-173); human spinal cord, spleen, lung, skeletal muscle, placenta, fetal kidney, and fetal lung cells (SEQ ID NOS:174-178); human testis, fetal kidney, and aorta cells (SEQ ID NOS:179 and 180); human testis, small intestine, and uterus cells (SEQ ID NOS:181-189); human pituitary, testis, skeletal muscle, adipose, esophagus, cervix, pericardium, fetal kidney, and fetal lung cells (SEQ ID NOS:190-194); human fetal brain, brain, pituitary, spinal cord, thymus, spleen, lymph node, trachea, lung, kidney, fetal liver, liver, prostate, testis, thyroid, adrenal gland, pancreas, salivary gland, stomach, small intestine, colon, skeletal muscle, heart uterus, mammary gland, adipose, skin, bladder, cervix, pericardium, ovary, fetal kidney, fetal lung, gall bladder, tongue, embryo, sarcoma, carcinoma, and endothelial cells (SEQ ID NOS:195-199); human fetal brain, pituitary, spinal cord, thymus, spleen, lymph node, liver, prostate, testis, thyroid, adrenal gland, skeletal muscle, uterus, placenta, mammary gland, bladder, rectum, pericardium, ovary, fetal kidney, fetal lung, gall bladder, tongue, aorta, 6-, 9-, and 12- week embryos, adenocarcinoma, osteosarcoma, and endothelial cells (SEQ ID NOS:200-204); human fetal brain, pituitary, spinal cord, spleen, lymph node, testis, thyroid, adrenal gland, colon, skeletal muscle, uterus, placenta, and fetal kidney cells (SEQ ID NOS:205-221); human testis, mammary gland, and salivary gland cells (SEQ ID NOS:222 and 223); human brain, testis, kidney, and trachea cells (SEQ ID NOS:224 and 225); human pancreas, testis, adipose, esophagus, cervix, rectum, and pericardium cells (SEQ ID NOS:226-231); human placenta, bone marrow, trachea, testis, liver, and kidney cells (SEQ ID NOS:232-250); human placenta, bone marrow, trachea, testis, liver, and kidney cells (SEQ ID NOS:251-255); and human testis, heart, skeletal muscle, lung, adrenal gland, kidney, prostate, and lymph node cells (SEQ ID NOS:256 and 257).

[0019] Additionally, SEQ ID NOS:118-122 were used as nucleic acid hybridization probes to examine gene expression in normal mouse tissue sections. This analysis revealed expression of mRNA corresponding to the murine homolog of SEQ ID NOS:118-122 in numerous neurons throughout the mouse brain. Expression was particularly striking in a susbset of neurons in the internal granular layer of the cerebellum (presumably Golgi neurons), and in a collection of neurons that define the substantia nigra of the midbrain, associated with cells responsible for the synthesis of dopamine, the pars compacta, indicating potential involvement of SEQ ID NOS:118-122 in Parkinson's disease.

[0020] The described membrane protein sequences were compiled from: gene trapped human cells and a human placenta cDNA library (SEQ ID NOS:3-61); gene trapped human cells and cDNA clones isolated from human lymph node and bone marrow cDNA libraries (SEQ ID NOS:62-114); gene trapped human cells and a human placenta and thyroid cDNA libraries (SEQ ID NOS:115-117); gene trapped human cells and cDNA clones isolated from human brain and cerebellum cDNA libraries (SEQ ID NOS:118-122); gene trapped human cells and CDNA clones isolated from human kidney and testis cDNA libraries (SEQ ID NOS:132-140); human genomic sequences in conjunction with cDNAs isolated from a human kidney cDNA library (SEQ ID NOS:141-144); clustered human gene trapped sequences, genomic sequence, ESTs, and cDNAs from a human testis, skeletal muscle, mammary gland, and lymph node cDNA libraries (SEQ ID NOS:145-152); cDNAs present in adipose and testis cDNA libraries (SEQ ID NOS:153-155); human genomic sequences in conjunction with cDNAs generated from a human kidney mRNAs (SEQ ID NOS:156-160); human genomic sequences in conjunction with cDNAs generated from mRNAs from human skeletal muscle, testis, and spleen cells (SEQ ID NOS:161-180); human genomic sequences in conjunction with cDNAs generated from mRNAs from human testis, small intestine, and uterus (SEQ ID NOS:181-189); human genomic sequences in conjunction with cDNAs generated from mRNAs from human testis, pituitary, and adipose (SEQ ID NOS:190-194); aligning cDNAs from umbilical vein, lung, adrenal gland, mammary gland, prostate, thyroid, fetus, kidney, testis, and placenta mRNAs, and human genomic DNA sequence (SEQ ID NOS:195-199); human genomic sequences (GenBank Accession Number AC068148), in conjunction with cDNAs generated from mRNAs from human fetal brain, lung, and testis cells (SEQ ID NOS:200-204); from clustered genomic sequence, ESTs, and cDNAs produced using human placenta, pituitary gland, colon, testis, lymph node, skeletal muscle, fetus, thyroid, uterus, bone marrow, and adrenal gland mRNAs (SEQ ID NOS:205-221); sequences from gene trapped human cells and cDNA clones isolated from a human placenta cDNA library (SEQ ID NOS:226-231); sequences from gene trapped sequences and cDNA clones isolated from human trachea, liver, and testis cDNA libraries (SEQ ID NOS:232-250); human genomic sequences in conjunction with cDNAs isolated from human kidney and lymph node cDNA libraries (SEQ ID NOS:251-255); and cDNAs present in a skeletal muscle cDNA library (SEQ ID NOS:256 and 257). The mRNAs and/or cDNA libraries used were purchased from Clontech (Palo Alto, Calif.) and/or Edge Biosystems (Gaithersburg, Md.).

[0021] Many of the described membrane proteins are transmembrane proteins of the 7TM family of receptors. As with other GPCRs, signal transduction is triggered when a ligand binds to the receptor. Interfering with the binding of the natural ligand, or neutralizing or removing the ligand, or interference with its binding to a GPCR will effect GPCR-mediated signal transduction. Because of their biological significance, 7TM, and particularly GPCR, proteins have been subjected to intense scientific and commercial scrutiny (see, e.g., U.S. Pat. Nos. 5,942,416 and 5,891,720, for applications, uses, and assays involving GPCRs).

[0022] In addition, the presently described membrane proteins share significant homology with: neuropeptide hormone receptors, including the vasopressin receptor and its evolutionary precursor, the vasotocin receptor, the oxytocin receptor of mammals, the marsupial homologue the mesotocin receptor, and the isotocin receptor of fish (SEQ ID NOS:1 and 2); metabotropic amino acid, or glutamate, receptors, which have been implicated in neurodegeneration, seizures, schizophrenia, and other neural or behavioral disorders, and thus have been the subject of considerable study, as evidenced by U.S. Pat. Nos. 5,869,609, 5,912,122, 5,981,195, and 6,001,581, and U.S. Provisional Application Ser. No. 60/085,973 (SEQ ID NOS:118-122); mammalian taste and pheromone receptors, calcium sensing receptors, and peptide hormone receptors (SEQ ID NOS:132-140); a domain of latrophilin (latrotoxin receptor) and peptide hormone receptors (SEQ ID NOS:141-144); mammalian membrane ligand (particularly myrosinase) or lectin binding proteins (SEQ ID NOS:145-147); mammalian transporter proteins, particularly those associated with multi-drug resistance (SEQ ID NOS:148-152); olfactory receptors (SEQ ID NOS:156-160); olfactory receptors (SEQ ID NOS:161-180); GPCRs of the human epididymis 6 (HE6), secretin, and latrotoxin receptor families (SEQ ID NOS:181-189); GPCRs of the hepta-helical receptor families (SEQ ID NOS:190-194); mammalian alpha macroglobulin proteins (uses for which are described in, for example, U.S. Pat. No. 5,902,787), complement proteins and cytochrome oxidases (SEQ ID NO:195-199); olfactory receptors, SLIT proteins, LIG-1 protein, and insulin-like growth factor binding proteins (SEQ ID NOS:200-204); taste receptors; see, e.g., GenBank Accession Numbers AAS97395, 20142349 and DAA00013 (SEQ ID NOS:205-221); and the mammalian TRK-fused gene, latrophilin (latrotoxin receptor), and peptide hormone receptors (SEQ ID NOS:232-250).

[0023] While certain of the disclosed sequences display sequence and structural homology to mammalian olfactory receptors, the inventors have discovered that these sequences can be expressed in a variety of human cells beyond olfactory receptors, which indicate that the described receptors can play important biological roles in the body beyond that of olfactory functions.

[0024] The invention encompasses the use of the described membrane protein nucleotides, membrane proteins and peptides, antibodies, preferably humanized monoclonal antibodies, or binding fragments, domains, or fusion proteins thereof, to the disclosed membrane proteins (which can, for example, act as agonists or antagonists of the disclosed membrane proteins), and antagonists that inhibit activity or expression of the disclosed membrane proteins, or agonists that increase or activate activity or expression of the disclosed membrane proteins, in diagnosis and/or treatment of disease.

[0025] In particular, the invention described in the subsections below encompasses polypeptides or peptides corresponding to functional domains of the disclosed membrane proteins (e.g., ECD, TM or CD), mutated, truncated or deleted versions of the disclosed membrane proteins (e.g., missing one or more functional domains or portions thereof, such as, ΔECD, ΔTM and/or ΔCD), fusion proteins (e.g., a membrane protein or a functional domain of a membrane protein, such as the ECD, fused to an unrelated protein or peptide such as an immunoglobulin constant region, i.e., IgFc), nucleotide sequences encoding such products, and host cell expression systems that can produce such products.

[0026] The invention also encompasses antibodies and anti-idiotypic antibodies (including Fab fragments), antagonists and agonists of the disclosed membrane proteins, as well as compounds or nucleotide constructs that inhibit expression (transcription factor inhibitors, antisense and ribozyme molecules, or gene or regulatory sequence replacement constructs), or promote expression (e.g., expression constructs in which membrane protein coding sequences are operatively associated with expression control elements such as promoters, promoter/enhancers, etc.), of a gene encoding one or more of the disclosed membrane proteins. The invention also relates to host cells and animals genetically engineered to express the disclosed human membrane proteins (or mutants thereof), or to inhibit or “knock-out” expression of the animal's endogenous membrane protein gene(s).

[0027] The disclosed proteins or peptides, fusion proteins, nucleotide sequences, antibodies, antagonists, and agonists, can be useful for the detection of mutant versions of the disclosed membrane proteins, or inappropriately expressed membrane protein sequences, for the diagnosis of disease. The disclosed proteins, peptides, fusion proteins, nucleotide sequences, host cell expression systems, antibodies, antagonists, agonists, and genetically engineered cells and animals, can be used for screening for drugs (or high throughput screening of combinatorial libraries) effective in the treatment of the symptomatic or phenotypic manifestations of perturbing the normal function of the membrane protein in the body. In the case of GPCRs, the use of engineered host cells and/or animals may offer an advantage in that such systems allow not only for the identification of compounds that bind to an ECD of a GPCR, but can also identify compounds that affect the signal transduced by an activated GPCR.

[0028] Finally, the disclosed protein products (especially soluble derivatives such as peptides corresponding to an ECD, or truncated polypeptides lacking one or more TM domains), fusion protein products (especially Ig fusion proteins, i.e., fusions of a membrane protein, or a domain of a membrane protein (e.g., ECD or ΔTM) to an IgFc), antibodies and anti-idiotypic antibodies (including Fab fragments), antagonists or agonists (including compounds that modulate signal transduction, which may act on downstream targets in a GPCR- or membrane protein-mediated signal transduction pathway), can be used for therapy of such diseases. For example, the administration of an effective amount of a soluble ECD, ΔTM, or an ECD-IgFc fusion protein, or an anti-idiotypic antibody (or its Fab) that mimics the membrane protein ECD, would “mop up” or “neutralize” the endogenous membrane protein ligand, and prevent or reduce binding and receptor activation.

[0029] Nucleotide constructs encoding such membrane protein products can be used to genetically engineer host cells to express such products in vivo; these genetically engineered cells function as “bioreactors” in the body, delivering a continuous supply of a membrane protein, or peptide thereof, soluble ECD or ΔTM, or a membrane protein fusion protein, that will “mop up” or neutralize a membrane protein ligand. Nucleotide constructs encoding functional membrane proteins, mutant membrane proteins, as well as antisense and ribozyme molecules, can be used in “gene therapy” approaches for the modulation of membrane protein expression. Thus, the invention also encompasses pharmaceutical formulations and methods for treating biological disorders.

[0030] Various aspects of the invention are described in greater detail in the subsections below.

### 7.1 Membrane Protein Nucleic Acid Sequences

[0031] The cDNA sequences and deduced amino acid sequences of the described human membrane proteins (SEQ ID NOS:1-257) are presented in the Sequence Listing.

[0032] A number of polymorphisms were identified during the sequencing of the disclosed nucleic acid sequences, including: a G/A polymorphism at nucleotide (nt) position 817 of SEQ ID NO:1 (denoted by an “r” in the Sequence Listing), which can result in a valine or isoleucine residue at corresponding amino acid (aa) position 273 of SEQ ID NO:2; a G/A polymorphism at nt position 923 of SEQ ID NO:1 (denoted by an “r” in the Sequence Listing), which can result in an arginine or histidine residue at corresponding aa position 308 of SEQ ID NO:2; a C/T polymorphism at nt position 320 of SEQ ID NO:132 and nt position 86 of SEQ ID NO:134 (denoted by a “y” in the Sequence Listing), which can result in a serine (preferred) or phenylalanine residue at corresponding aa position 107 of SEQ ID NO:133 and aa position 29 of SEQ ID NO:135; an A/G polymorphism at nt position 1114 of SEQ ID NO:132, nt position 880 of SEQ ID NO:134, and nt position 520 of SEQ ID NO:136 (denoted by an “r” in the Sequence Listing”), which can result in an alanine (preferred) or threonine residue at corresponding aa position 372 of SEQ ID NO:133, aa position 294 of SEQ ID NO:135, and aa position 174 of SEQ ID NO:137; a silent C/T polymorphism at nt position 2283 of SEQ ID NO:132, nt position 2049 of SEQ ID NO:134, and nt position 462 of SEQ ID NO:138, both of which lead to a cysteine residue at corresponding aa position 761 of SEQ ID NO:133, aa position 683 of SEQ ID NO:135, and aa position 154 of SEQ ID NO:139; a silent G/C/T polymorphism at nt position 474 of SEQ ID NO:145 (denoted by a “b” in the Sequence Listing), each of which results in a glycine residue at corresponding aa position 158 of SEQ ID NO:146; a G/A polymorphism at nt position 1457 of SEQ ID NOS:148 and 150 (denoted by an “r” in the Sequence Listing), which can result in an arginine or glutamine residue at corresponding aa position 486 of SEQ ID NOS:149 and 151; a G/A polymorphism at nt position 1678 of SEQ ID NOS:148 and 150 (denoted by an “r” in the Sequence Listing), which can result in a lysine or glutamate residue at corresponding aa position 560 of SEQ ID NOS:149 and 151; a G/T polymorphism at nt position 3535 of SEQ ID NO:148 (denoted by a “k” in the Sequence Listing), which can result in a valine or leucine residue at corresponding aa position 1178 of SEQ ID NO:149; a T/G polymorphism at nt position 233 of SEQ ID NO:153, which can result in a valine or glycine residue at corresponding aa position 78 of SEQ ID NO:154; a C/T polymorphism at nt position 316 of SEQ ID NO:153, which can result in an arginine or cysteine residue at corresponding aa position 106 of SEQ ID NO:154; a silent T/C polymorphism at nt position 1401 of SEQ ID NO:156 (denoted by a “y” in the Sequence Listing), both of which result in a histidine residue at corresponding aa position 467 of SEQ ID NO:157; a silent G/A polymorphism at nt position 2430 of SEQ ID NO:156 (denoted by an “r” in the Sequence Listing), both of which result in a proline residue at corresponding aa position 810 of SEQ ID NO:157; a G/A polymorphism at nt position 146 of SEQ ID NO:168, which can result in a serine or asparagine residue at corresponding aa position 49 of SEQ ID NO:169; a silent C/T polymorphism at nt position 511 of SEQ ID NO:171, both of which result in a leucine residue at corresponding aa position 171 of SEQ ID NO:172; a C/A polymorphism at nt position 766 of SEQ ID NO:171, which can result in a leucine or methionine residue at corresponding aa position 256 of SEQ ID NO:172; an A/G polymorphism at nt position 420 of SEQ ID NO:174 and nt position 276 of SEQ ID NO:176, which can result in a leucine or methionine residue at corresponding aa position 140 of SEQ ID NO:175 and aa position 92 of SEQ ID NO:177; a silent T/C polymorphism at nt position 432 of SEQ ID NO:179 (denoted by a “y” in the Sequence Listing), both of which result in an alanine residue at corresponding aa position 144 of SEQ ID NO:180; a T/C polymorphism at nt position 3601 of SEQ ID NO:181 (denoted by a “y” in the Sequence Listing), which can result in a phenylalanine or leucine residue at corresponding aa position 1201 of SEQ ID NO:182; a T/C polymorphism at nt position 2173 of SEQ ID NO:183 (denoted by a “y” in the Sequence Listing), which can result in a phenylalanine or leucine residue at corresponding aa position 725 of SEQ ID NO:184; a G/A polymorphism at nt position 239 of SEQ ID NO:190 and nt position 53 of SEQ ID NO:192, which can result in a glutamine or arginine residue at corresponding aa position 80 of SEQ ID NO:191 and aa position 18 of SEQ ID NO:193; a silent G/T polymorphism at nt position 723 of SEQ ID NO:190 and nt position 537 of SEQ ID NO:192, both of which result in a serine residue at corresponding aa position 241 of SEQ ID NO:191 and aa position 179 of SEQ ID NO:193; an A/T polymorphism at nucleotide position 766 of SEQ ID NO:190 and nt position 580 of SEQ ID NO:192, which can result in a leucine or methionine residue at corresponding aa position 256 of SEQ ID NO:191 and aa position 194 of SEQ ID NO:193; a silent T/C polymorphism at nucleotide position 1074 of SEQ ID NO:190 and nt position 888 of SEQ ID NO:192, both of which result in a serine residue at corresponding aa position 358 of SEQ ID NO:191 and aa position 296 of SEQ ID NO:193; a G/A polymorphism at nucleotide position 1075 of SEQ ID NO:190 and nt position 889 of SEQ ID NO:192, which can result in a glutamate or lysine residue at corresponding aa position 359 of SEQ ID NO:191 and aa position 297 of SEQ ID NO:193; a G/A polymorphism at nucleotide position 1195 of SEQ ID NO:190 and nt position 1009 of SEQ ID NO:192, which can result in an isoleucine or valine residue at corresponding aa position 399 of SEQ ID NO:191 and aa position 337 of SEQ ID NO:193; an A/G polymorphism at nt position 2108 of SEQ ID NOS:195 and 197, which can result in a tyrosine or cysteine residue at corresponding aa position 703 of SEQ ID NOS:196 and 198; an A/G polymorphism at nt position 2390 of SEQ ID NOS:195 and 197, which can result in a serine or asparagine residue at aa position 797 of SEQ ID NOS:196 and 198; a T/C polymorphism at nt position 3722 of SEQ ID NO:195, which can result in a methionine or threonine residue at corresponding aa position 1241 of SEQ ID NO:196; a G/A polymorphism at nucleotide position 2533 of SEQ ID NOS:195 and 197, which can result in a valine or isoleucine residue at aa position 845 of SEQ ID NOS:196 and 198; a silent T/C polymorphism at nucleotide position 4287 of SEQ ID NO:195, both of which result in a valine residue at corresponding aa position 1429 of SEQ ID NO:196; a C/G polymorphism at nt position 216 of SEQ ID NOS:205 and 207, and nt position 102 of SEQ ID NOS:217 and 219, which can result in an aspartate or glutamate residue at corresponding aa position 72 of SEQ ID NOS:206 and 208, and aa position 34 of SEQ ID NOS:218 and 220; a silent G/A polymorphism at nt position 1320 of SEQ ID NOS:205 and 207, nt position 981 of SEQ ID NOS:209 and 213, nt position 975 of SEQ ID NOS:211 and 215, and nt position 1206 of SEQ ID NOS:217 and 219, both of which encode a glutamine residue at corresponding aa position 440 of SEQ ID NOS:206 and 208, aa position 327 of SEQ ID NOS:210 and 214, aa position 325 of SEQ ID NOS:212 and 216, and aa position 402 of SEQ ID NOS:218 and 220; a C/G polymorphism at nt position 1324 of SEQ ID NOS:205 and 207, nt position 985 of SEQ ID NOS:209 and 213, nt position 979 of SEQ ID NOS:211 and 215, and nt position 1210 of SEQ ID NOS:217 and 219, which can result in a leucine or valine residue at corresponding aa position 442 of SEQ ID NOS:206 and 208, aa position 329 of SEQ ID NOS:210 and 214, aa position 327 of SEQ ID NOS:212 and 216, and aa position 404 of SEQ ID NOS:218 and 220; a silent C/T polymorphism at nt position 1347 of SEQ ID NOS:205 and 207, nt position 1008 of SEQ ID NOS:209 and 213, nt position 1002 of SEQ ID NOS:211 and 215, and nt position 1233 of SEQ ID NOS:217 and 219, both of which encode an asparagine residue at corresponding aa position 449 of SEQ ID NOS:206 and 208, aa position 336 of SEQ ID NOS:210 and 214, aa position 334 of SEQ ID NOS:212 and 216, and aa position 411 of SEQ ID NOS:218 and 220; a G/C polymorphism at nt position 1485 of SEQ ID NOS:206 and 208, nt position 1146 of SEQ ID NOS:209 and 213, nt position 1140 of SEQ ID NOS:211 and 215, and nt position 1371 of SEQ ID NOS:217 and 219, which can result in a lysine or asparagine residue at corresponding aa position 495 of SEQ ID NOS:206 and 208, aa position 382 of SEQ ID NOS:210 and 214, aa position 380 of SEQ ID NOS:212 and 216, and aa position 457 of SEQ ID NOS:218 and 220; a G/A polymorphism at nt position 1522 of SEQ ID NOS:205 and 207, nt position 1183 of SEQ ID NOS:209 and 213, nt position 1177 of SEQ ID NOS:211 and 215, and nt position 1408 of SEQ ID NOS:217 and 219, which can result in an aspartate or asparagine residue at corresponding aa position 508 of SEQ ID NO:206 and 208, aa position 395 of SEQ ID NOS:210 and 214, aa position 393 of SEQ ID NOS:212 and 216, and aa position 470 of SEQ ID NOS:218 and 220; a silent C/G polymorphism at nt position 1542 of SEQ ID NOS:205 and 207, nt position 1203 of SEQ ID NOS:209 and 213, nt position 1197 of SEQ ID NOS:211 and 215, and nt position 1428 of SEQ ID NOS:217 and 219, both of which encode a glycine residue at corresponding aa position 514 of SEQ ID NOS:206 and 208, aa position 401 of SEQ ID NOS:210 and 214, aa position 399 of SEQ ID NOS:212 and 216, and aa position 476 of SEQ ID NOS:218 and 220; a G/A polymorphism at nt position 2306 of SEQ ID NO:205, nt position 2330 of SEQ ID NO:207, nt position 1967 of SEQ ID NO:209, nt position 1961 of SEQ ID NO:211, nt position 1991 of SEQ ID NO:213, nt position 1985 of SEQ ID NO:215, nt position 2192 of SEQ ID NO:217, and nt position 2216 of SEQ ID NO:219, which can result in a glycine or aspartate residue at corresponding aa position 769 of SEQ ID NO:206, aa position 777 of SEQ ID NO:208, aa position 656 of SEQ ID NO:210, aa position 654 of SEQ ID NO:212, aa position 664 of SEQ ID NO:214, aa position 662 of SEQ ID NO:216, aa position 731 of SEQ ID NO:218, and aa position 739 of SEQ ID NO:220; a GCG/CCC polymorphism at nt positions 2311-2313 of SEQ ID NO:205, nt positions 2335-2337 of SEQ ID NO:207, nt positions 1972-1974 of SEQ ID NO:209, nt positions 1966-1968 of SEQ ID NO:211, nt positions 1996-1998 of SEQ ID NO:213, nt positions 1990-1992 of SEQ ID NO:215, nt positions 2197-2199 of SEQ ID NO:217, and nt positions 2221-2223 of SEQ ID NO:219, which can result in an alanine or proline residue at corresponding aa position 771 of SEQ ID NO:206, aa position 779 of SEQ ID NO:208, aa position 658 of SEQ ID NO:210, aa position 656 of SEQ ID NO:212, aa position 666 of SEQ ID NO:214, aa position 664 of SEQ ID NO:216, aa position 733 of SEQ ID NO:218, and aa position 741 of SEQ ID NO:220; a C/T polymorphism at nt position 2383 of SEQ ID NO:205, nt position 2407 of SEQ ID NO:207, nt position 2044 of SEQ ID NO:209, nt position 2038 of SEQ ID NO:211, nt position 2068 of SEQ ID NO:213, nt position 2062 of SEQ ID NO:215, nt position 2269 of SEQ ID NO:217, and nt position 2293 of SEQ ID NO:219, which can result in an arginine or cysteine residue at corresponding aa position 795 of SEQ ID NO:206, aa position 803 of SEQ ID NO:208, aa position 682 of SEQ ID NO:210, aa position 680 of SEQ ID NO:212, aa position 690 of SEQ ID NO:214, aa position 688 of SEQ ID NO:216, aa position 757 of SEQ ID NO:218, and aa position 765 of SEQ ID NO:220; a silent C/T polymorphism at nt position 846 of SEQ ID NOS:226 and 228, both of which result in an isoleucine residue at corresponding aa position 282 of SEQ ID NOS:227 and 229; an A/G polymorphism in the 5′ UTR of SEQ ID NOS:230 and 231; a C/T polymorphism at nt position 1075 of SEQ ID NOS:232 and 236, and nt position 211 of SEQ ID NOS:238 and 242, which can result in a glutamine residue (preferred) or a stop codon at corresponding aa position 359 of SEQ ID NOS:233 and 237, and aa position 71 of SEQ ID NOS:239 and 243; and a silent A/G polymorphism at nt position 2091 of SEQ ID NO:251 and nt position 1587 of SEQ ID NO:253 (denoted by an “r” in the Sequence Listing), both of which result in a glutamine residue at corresponding aa position 697 of SEQ ID NO:252, and aa position 529 of SEQ ID NO:254.

[0033] The genes encoding the described membrane proteins are apparently located on: a single coding exon (which may include one or more introns that can be spliced-out in certain cells or tissues) on human chromosome 11, see GenBank Accession Number AC027026 (SEQ ID NOS:123-131); human chromosome 6, see GenBank Accession Number AL355518 (SEQ ID NOS:141-144); human chromosome 6 (SEQ ID NOS:156-160); the human X chromosome, see GenBank Accession Number AL161778 (SEQ ID NOS:181-189); human chromosome 6, see GenBank Accession Number AL356421 (SEQ ID NOS:190-194); human chromosome 6, see GenBank Accession Number AC026605 (SEQ ID NOS:195-199); human chromosome 8 and/or 18 (SEQ ID NOS:200-204); and human chromosome 10, see GenBank Accession Number AL139281 (SEQ ID NOS:205-221).

[0034] The present invention includes the human DNA sequences presented in the Sequence Listing (and vectors comprising the same), and additionally contemplates any nucleotide sequence encoding a contiguous and functional membrane protein ORF that hybridizes to a complement of a DNA sequences presented in the Sequence Listing under highly stringent conditions, e.g., hybridization to filter-bound DNA in 0.5 M NaHPO₄, 7% sodium dodecyl sulfate (SDS), 1 mM EDTA at 65° C., and washing in 0.1×SSC/0.1% SDS at 68° C. (“Current Protocols in Molecular Biology” (Ausubel et al., eds., Green Publishing Associates, Inc., and John Wiley & Sons, Inc., New York, 1989)) and encodes a functionally equivalent gene product. Additionally contemplated are any nucleotide sequences that hybridize to the complement of DNA sequences that encode and express an amino acid sequence presented in the Sequence Listing under moderately stringent conditions, e.g., washing in 0.2×SSC/0.1% SDS at 42° C. (“Current Protocols in Molecular Biology”, supra), yet that still encode a functionally equivalent gene product. Functional equivalents of the disclosed membrane proteins include naturally occurring membrane proteins present in other species, and mutant membrane proteins, whether naturally occurring or engineered (by site directed mutagenesis, gene shuffling, directed evolution as described in, for example, U.S. Pat. Nos. 5,837,458 and 5,723,323). The invention also includes degenerate nucleic acid variants of the disclosed polynucleotide sequences.

[0035] Additionally contemplated are polynucleotides encoding membrane protein ORFs, or their functional equivalents, encoded by polynucleotide sequences that are about 99, 95, 90, or about 85 percent similar or identical to corresponding regions of the polynucleotide sequences described in the Sequence Listing (as measured by BLAST sequence comparison analysis using, for example, the GCG sequence analysis package (SEQUENCHER 3.0, Gene Codes Corp., Ann Arbor, Mich.) using default parameters).

[0036] The invention also includes nucleic acid molecules, preferably DNA molecules, that hybridize to, and are therefore the complements of, the described nucleotide sequences. Such hybridization conditions may be highly stringent or less highly stringent, as described herein. In instances wherein the nucleic acid molecules are deoxyoligonucleotides, such molecules are about 16 to about 100 bases long, about 20 to about 80 bases long, or about 34 to about 45 bases long, or any variation or combination of sizes represented therein, incorporating a contiguous region of nucleotide sequence first disclosed in the Sequence Listing, and can be used in conjunction with the polymerase chain reaction (PCR) to screen libraries, isolate clones, and prepare cloning and sequencing templates, etc.

[0037] Alternatively, such oligonucleotides can be used as hybridization probes for screening libraries, and assessing gene expression patterns (particularly using a microarray or high-throughput “chip” format). Additionally, a series of the described oligonucleotide sequences, or the complements thereof, can be used to represent all or a portion of the described membrane protein sequences. An oligonucleotide or polynucleotide sequence first disclosed in at least a portion of one or more of the sequences of SEQ ID NOS:1-257 can be used as a hybridization probe in conjunction with a solid support matrix/substrate (resins, beads, membranes, plastics, polymers, metal or metallized substrates, crystalline or polycrystalline substrates, etc.). Of particular note are spatially addressable arrays (i.e., gene chips, microtiter plates, etc.) of oligonucleotides and polynucleotides, or corresponding oligopeptides and polypeptides, wherein at least one of the biopolymers present on the spatially addressable array comprises an oligonucleotide or polynucleotide sequence first disclosed in at least one of the sequences of SEQ ID NOS:1-257, or an amino acid sequence encoded thereby. Methods for attaching biopolymers to, or synthesizing biopolymers on, solid support matrices, and conducting binding studies thereon are disclosed in, inter alia, U.S. Pat. Nos. 5,700,637, 5,556,752, 5,744,305, 4,631,211, 5,445,934, 5,252,743, 4,713,326, 5,424,186, and 4,689,405.

[0038] Addressable arrays comprising sequences first disclosed in SEQ ID NOS:1-257 can be used to identify and characterize the temporal and tissue specific expression of a gene. These addressable arrays incorporate oligonucleotide sequences of sufficient length to confer the required specificity, yet be within the limitations of the production technology. The length of these probes is within a range of between about 8 to about 2000 nucleotides. Preferably the probes consist of 60 nucleotides and more preferably 25 nucleotides from the sequences first disclosed in SEQ ID NOS:1-257.

[0039] For example, a series of the described oligonucleotide sequences, or the complements thereof, can be used in chip format to represent all or a portion of the described membrane protein sequences. The oligonucleotides, typically between about 16 to about 40 (or any whole number within the stated range) nucleotides in length, can partially overlap each other and/or the membrane protein sequence may be represented using oligonucleotides that do not overlap. Accordingly, the described polynucleotide sequences shall typically comprise at least about two or three distinct oligonucleotide sequences of at least about 18 nucleotides in length that are each first disclosed in the Sequence Listing. Such oligonucleotide sequences can begin at any nucleotide present within a sequence in the Sequence Listing and proceed in either a sense (5′-to-3′) orientation vis-a-vis the described sequence or in an antisense (3′-to-5′) orientation.

[0040] Microarray-based analysis allows the discovery of broad patterns of genetic activity, providing new understanding of gene functions and generating novel and unexpected insight into transcriptional processes and biological mechanisms. The use of addressable arrays comprising sequences first disclosed in SEQ ID NOS:1-257 provides detailed information about transcriptional changes involved in a specific pathway, potentially leading to the identification of novel components or gene functions that manifest themselves as novel phenotypes.

[0041] Probes consisting of sequences first disclosed in SEQ ID NOS:1-257 can also be used in the identification, selection and validation of novel molecular targets for drug discovery. The use of these unique sequences permits the direct confirmation of drug targets and recognition of drug dependent changes in gene expression that are modulated through pathways distinct from the intended target of the drug. These unique sequences therefore also have utility in defining and monitoring both drug action and toxicity.

[0042] As an example of utility, the sequences first disclosed in SEQ ID NOS:1-257 can be utilized in microarrays or other assay formats, to screen collections of genetic material from patients who have a particular medical condition. These investigations can also be carried out using the sequences first disclosed in SEQ ID NOS:1-257 in silico and by comparing previously collected genetic databases and the disclosed sequences using computer software known to those in the art. Thus the sequences first disclosed in SEQ ID NOS:1-257 can be used to identify mutations associated with a particular disease, and also in diagnostic or prognostic assays.

[0043] Although the presently described sequences have been specifically described using nucleotide sequence, it should be appreciated that each of the sequences can uniquely be described using any of a wide variety of additional structural attributes, or combinations thereof. For example, a given sequence can be described by the net composition of the nucleotides present within a given region of the sequence in conjunction with the presence of one or more specific oligonucleotide sequence(s) first disclosed in SEQ ID NOS:1-257. Alternatively, a restriction map specifying the relative positions of restriction endonuclease digestion sites, or various palindromic or other specific oligonucleotide sequences can be used to structurally describe a given sequence. Such restriction maps, which are typically generated by widely available computer programs (e.g., SEQUENCHER 3.0, Gene Codes Corp., etc.), can optionally be used in conjunction with one or more discrete nucleotide sequence(s) present in the sequence that can be described by the relative position of the sequence relative to one or more additional sequence(s) or one or more restriction sites present in the disclosed sequence.

[0044] For oligonucleotides probes, highly stringent conditions may refer, e.g., to washing in 6×SSC/0.05% sodium pyrophosphate at 37° C. (for 14-base oligos), 48° C. (for 17-base oligos), 55° C. (for 20-base oligos), and 60° C. (for 23-base oligos). The described oligonucleotides may encode or act as antisense molecules, useful, for example, in gene regulation (and/or as antisense primers in amplification reactions of membrane protein nucleic acid sequences). With respect to gene regulation, such techniques can be used to regulate biological functions. Further, such sequences may be used as part of ribozyme and/or triple helix sequences, also useful for gene regulation.

[0045] Additionally, the antisense oligonucleotides may comprise at least one modified base moiety that is selected from the group including, but not limited to, 5-fluorouracil, 5-bromouracil, 5-chlorouracil, 5-iodouracil, hypoxanthine, xanthine, inosine, 4-acetylcytosine, 5-(carboxyhydroxylmethyl) uracil, dihydrouracil, 5-carboxymethylaminomethyl-2-thiouridine, 5-carboxymethylaminomethyluracil, beta-D-galactosylqueosine, N6-isopentenyladenine, 1-methylguanine, 1-methylinosine, 2,2-dimethylguanine, 2-methyladenine, 2-methylguanine, 3-methylcytosine, 5-methylcytosine, N6-adenine, 7-methylguanine, 5-methylaminomethyluracil, 5-methoxyaminomethyl-2-thiouracil, beta-D-mannosylqueosine, 5′-methoxycarboxymethyluracil, 5-methoxyuracil, 2-methylthio-N6-isopentenyladenine, uracil-5-oxyacetic acid (v), wybutoxosine, pseudouracil, queosine, 2-thiocytosine, 2-thiouracil, 4-thiouracil, 5-methyluracil, uracil-5-oxyacetic acid methylester, 5-methyl-2-thiouracil, 3-(3-amino-3-N-2-carboxypropyl) uracil, (acp3)w, and 2,6-diaminopurine.

[0046] The antisense oligonucleotide may also comprise at least one modified sugar moiety selected from the group including, but not limited to, arabinose, 2-fluoroarabinose, xylulose, and hexose. In another embodiment, the antisense oligonucleotide comprises at least one modified phosphate backbone selected from the group consisting of a phosphorothioate, a phosphorodithioate, a phosphoramidothioate, a phosphoramidate, a phosphordiamidate, a methylphosphonate, an alkyl phosphotriester, and a formacetal or analog thereof. In yet another embodiment, the antisense oligonucleotide is an α-anomeric oligonucleotide. An α-anomeric oligonucleotide forms specific double-stranded hybrids with complementary RNA in which, contrary to the usual β-units, the strands run parallel to each other (Gautier et al., Nucl. Acids Res. 15:6625-6641, 1987). The oligonucleotide is a 2′-0-methylribonucleotide (Inoue et al., Nucl. Acids Res. 15:6131-6148, 1987), or a chimeric RNA-DNA analogue (Inoue et al., FEBS Lett. 215:327-330, 1987). Alternatively, dsRNA can be used to disrupt the expression and function of a targeted membrane protein sequence.

[0047] Oligonucleotides of the invention may be synthesized by standard methods known in the art, e.g., by use of an automated DNA synthesizer (such as are commercially available from Biosearch Technologies, Inc. (Novato, Calif.), Applied Biosystems (Foster City, Calif.), etc.). As examples, phosphorothioate oligonucleotides may be synthesized (Stein et al., Nucl. Acids Res. 16:3209-3221, 1988), and methylphosphonate oligonucleotides can be prepared by use of controlled pore glass polymer supports (Sarin et al., Proc. Natl. Acad. Sci. USA 85:7448-7451, 1988).

[0048] Low stringency conditions are well-known to those of skill in the art, and will vary predictably depending on the specific organisms from which the library and the labeled sequences are derived. For guidance regarding such conditions, see, e.g., “Molecular Cloning, A Laboratory Manual” (Sambrook et al., eds., Cold Spring Harbor Press, Cold Spring Harbor, N.Y., 1989), “Current Protocols in Molecular Biology”, supra, and periodic updates thereof.

[0049] Alternatively, suitably labeled nucleotide probes may be used to screen a human genomic library using appropriately stringent conditions, or by PCR. The identification and characterization of human genomic clones is helpful for identifying polymorphisms (including, but not limited to, nucleotide repeats, microsatellite alleles, single nucleotide polymorphisms, or coding single nucleotide polymorphisms), determining the genomic structure of a given locus/allele, and designing diagnostic tests. For example, sequences derived from regions adjacent to the intron/exon boundaries of the human gene can be used to design primers for use in amplification assays to detect mutations within the exons, introns, splice sites (e.g., splice acceptor and/or donor sites), etc., that can be used in diagnostics and pharmacogenomics.

[0050] For example, the present sequences can be used in RFLP analysis to identify specific individuals. In this technique, an individual's genomic DNA is digested with one or more restriction enzymes, and probed on a Southern blot to yield unique bands for identification (as generally described in U.S. Pat. No. 5,272,057). In addition, the sequences of the present invention can be used to provide polynucleotide reagents, e.g., PCR primers, targeted to specific loci in the human genome, which can enhance the reliability of DNA-based forensic identifications by, for example, providing another “identification marker” (i.e., another DNA sequence that is unique to a particular individual). Actual base sequence information can be used for identification as an accurate alternative to patterns formed by restriction enzyme generated fragments.

[0051] Further, homologs of the disclosed membrane protein sequences may be isolated from nucleic acids of the organism of interest by performing PCR using two degenerate oligonucleotide primer pools designed on the basis of amino acid sequences within the membrane proteins or gene products disclosed herein. The template for the reaction may be total RNA, mRNA, and/or cDNA obtained by reverse transcription of mRNA prepared from, for example, human or non-human cell lines or tissue(s) known to express, or suspected of expressing, a membrane protein gene.

[0052] The PCR product may be subcloned and sequenced to ensure that the amplified sequences represent the sequence of the desired membrane protein gene. The PCR fragment may then be used to isolate a full length CDNA clone by a variety of methods. For example, the amplified fragment may be labeled and used to screen a cDNA library, such as a bacteriophage cDNA library. Alternatively, the labeled fragment may be used to isolate genomic clones via the screening of a genomic library.

[0053] PCR technology may also be utilized to isolate full length cDNA sequences. For example, RNA may be isolated, following standard procedures, from an appropriate cellular or tissue source (i.e., one known to express, or suspected of expressing, a membrane protein gene). A reverse transcription (RT) reaction may be performed on the RNA using an oligonucleotide primer specific for the most 5′ end of the amplified fragment for the priming of first strand synthesis. The resulting RNA/DNA hybrid may then be “tailed” using a standard terminal transferase reaction, the hybrid digested with RNase H, and second strand synthesis primed with a complementary primer. Thus, cDNA sequences upstream of the amplified fragment may easily be isolated. For a review of cloning strategies that may be used, see, e.g., “Molecular Cloning, A Laboratory Manual”, supra.

[0054] A cDNA of a mutant membrane protein gene can be isolated, for example, by using PCR. In this case, the first cDNA strand may be synthesized by hybridizing an oligo-dT oligonucleotide to mRNA isolated from tissue known to express, or suspected of expressing, a mutant membrane protein allele, in an individual putatively carrying a mutant membrane protein allele, and by extending the new strand with reverse transcriptase. The second strand of the cDNA is then synthesized using an oligonucleotide that hybridizes specifically to the 5′ end of the normal gene. Using these two primers, the product is then amplified via PCR, optionally cloned into a suitable vector, and subjected to DNA sequence analysis through methods well-known to those of skill in the art. By comparing the DNA sequence of the mutant membrane protein allele to that of the normal membrane protein allele, the mutation(s) responsible for the loss or alteration of function of the mutant membrane protein gene product can be ascertained.

[0055] Alternatively, a genomic library can be constructed using DNA obtained from an individual suspected of carrying, or known to carry, a mutant membrane protein allele, or a cDNA library can be constructed using RNA from a tissue known to express, or suspected of expressing, a mutant membrane protein allele. A normal membrane protein gene, or any suitable fragment thereof, can then be labeled and used as a probe to identify the corresponding mutant membrane protein allele in such libraries. Clones containing the mutant membrane protein gene sequences can then be purified and subjected to sequence analysis according to methods well-known to those of skill in the art.

[0056] Additionally, an expression library can be constructed utilizing cDNA synthesized from, for example, RNA isolated from a tissue known to express, or suspected of expressing, a mutant membrane protein allele in an individual suspected of carrying, or known to carry, such a mutant allele. In this manner, gene products made by the putatively mutant tissue may be expressed and screened using standard antibody screening techniques in conjunction with antibodies raised against the normal membrane protein, as described below in Section 7.3 (for screening techniques, see, e.g., “Antibodies: A Laboratory Manual” (Harlow and Lane, eds., Cold Spring Harbor Press, Cold Spring Harbor, N.Y., 1988)).

[0057] Additionally, screening can be accomplished by screening with labeled membrane protein fusion proteins, such as, for example, alkaline phosphatase-membrane protein or membrane protein-alkaline phosphatase fusion proteins. In cases where a mutation results in an expressed gene product with altered function (e.g., as a result of a missense or a frameshift mutation), a polyclonal set of antibodies to the wild-type membrane protein are likely to cross-react with the mutant membrane protein. Library clones detected via their reaction with such labeled antibodies can be purified and subjected to sequence analysis according to methods well-known to those of skill in the art.

[0058] The invention also encompasses nucleotide sequences that encode mutant membrane proteins, peptide fragments of the membrane proteins, truncated membrane proteins, and membrane protein fusion proteins. These include, but are not limited to, nucleotide sequences encoding mutant membrane proteins, as described herein, polypeptides or peptides corresponding to one or more ECD, TM and/or CD domain(s) of a membrane protein (or portions of these domains), truncated membrane proteins in which one or two of the domains is deleted, e.g., a soluble membrane protein lacking the TM or both the TM and CD regions, or a truncated, nonfunctional membrane protein lacking all or a portion of the CD region. Nucleotides encoding fusion proteins may include, but are not limited to, full length membrane protein sequences, truncated membrane proteins, or nucleotides encoding peptide fragments of the disclosed membrane proteins, fused to an unrelated protein or peptide, such as, for example, a transmembrane sequence, which anchors a membrane protein ECD to the cell, an IgFc domain, which increases the stability and half life of the resulting fusion protein in the bloodstream, or an enzyme, fluorescent protein, or luminescent protein that can be used as a marker.

[0059] The invention also encompasses: (a) DNA vectors that contain any of the foregoing membrane protein coding sequences and/or their complements (i.e., antisense); (b) DNA expression vectors that contain any of the foregoing membrane protein coding sequences operatively associated with at least a first regulatory element that directs the expression of the coding sequences (for example, baculovirus vectors as described in U.S. Pat. No. 5,869,336); (c) genetically engineered host cells that contain any of the foregoing membrane protein coding sequences operatively associated with at least a first regulatory element that directs the expression of the coding sequences in the host cell; and (d) genetically engineered host cells that express an endogenous membrane protein sequence under the control of an exogenously introduced regulatory element (i.e., gene activation). As used herein, regulatory elements include, but are not limited to, inducible and non-inducible promoters, enhancers, operators, and other elements known to those skilled in the art that drive and regulate expression. Such regulatory elements include, but are not limited to, the cytomegalovirus hCMV immediate early gene, regulatable, viral (particularly retroviral LTR promoters), the early or late promoters of SV40 or adenovirus, the lac system, the trp system, the tet system, the TAC system, the TRC system, the major operator and promoter regions of phage lambda, the control regions of fd coat protein, the promoter for 3-phosphoglycerate kinase, the promoters of acid phosphatase, and the promoters of the yeast α-mating factors.

[0060] An additional application of the described membrane protein polynucleotide sequences is their use in the molecular mutagenesis/evolution of proteins that are at least partially encoded by the described novel sequences using, for example, polynucleotide shuffling or related methodologies (see, e.g., U.S. Pat. Nos. 5,830,721, 5,723,323, and 5,837,458).

[0061] Additionally contemplated uses for the described sequences include the engineering of constitutively “on” variants for use in cell assays and genetically engineered animals, using the methods and applications described in U.S. Provisional Patent Application Ser. Nos. 60/110,906, 60/106,300, 60/094,879, and 60/121,851.

[0062] The disclosed gene products can also be expressed in non-human transgenic animals. Animals of any species, including, but not limited to, worms, mice, rats, rabbits, guinea pigs, pigs, micro-pigs, birds, goats, and non-human primates, e.g., baboons, monkeys, and chimpanzees, may be used to generate transgenic animals.

[0063] Any technique known in the art may be used to introduce a membrane protein transgene into animals to produce the founder lines of transgenic animals. Such techniques include, but are not limited to, pronuclear microinjection (U.S. Pat. No. 4,873,191); retrovirus mediated gene transfer into germ lines (Van der Putten et al., Proc. Natl. Acad. Sci. USA 82:6148-6152, 1985); gene targeting in embryonic stem cells (Thompson et al., Cell 56:313-321, 1989); electroporation of embryos (Lo, Mol. Cell. Biol. 3:1803-1814, 1983); and sperm-mediated gene transfer (Lavitrano et al., Cell 57:717-723, 1989); etc. For a review of such techniques, see, e.g., Gordon, Intl. Rev. Cytol. 115:171-229, 1989.

[0064] The present invention provides for transgenic animals that carry the membrane protein transgene in all their cells, as well as animals that carry the transgene in some, but not all their cells, i.e., mosaic animals or somatic cell transgenic animals. The transgene may be integrated as a single transgene or in concatamers, e.g., head-to-head tandems or head-to-tail tandems. The transgene may also be selectively introduced into and activated in a particular cell-type by following, for example, the teaching of Lasko et al. (Proc. Natl. Acad. Sci. USA 89:6232-6236, 1992). The regulatory sequences required for such a cell-type specific activation will depend upon the particular cell-type of interest, and will be apparent to those of skill in the art.

[0065] When it is desired that a membrane protein transgene be integrated into the chromosomal site of the endogenous membrane protein gene, gene targeting is preferred. Briefly, when such a technique is to be utilized, vectors containing some nucleotide sequences homologous to the endogenous membrane protein gene are designed for the purpose of integrating, via homologous recombination with chromosomal sequences, into and disrupting the function of the nucleotide sequence of the endogenous membrane protein gene (i.e., “knock-out” animals).

[0066] The transgene can also be selectively introduced into a particular cell-type, thus inactivating the endogenous membrane protein gene in only that cell-type, by following, for example, the teaching of Gu et al. (Science 265:103-106, 1994). The regulatory sequences required for such a cell-type specific inactivation will depend upon the particular cell-type of interest, and will be apparent to those of skill in the art.

[0067] Once transgenic animals have been generated, the expression of the recombinant membrane protein gene may be assayed utilizing standard techniques. Initial screening may be accomplished by Southern blot analysis or PCR techniques to analyze animal tissues to assay whether integration of the transgene has taken place. The level of mRNA expression of the transgene in the tissues of the transgenic animals may also be assessed using techniques that include, but are not limited to, Northern blot analysis of tissue samples obtained from the animal, in situ hybridization analysis, and RT-PCR. Samples of membrane protein gene-expressing tissue may also be evaluated immunocytochemically using antibodies specific for the membrane protein transgene product.

### 7.2 Membrane Protein Amino Acid Sequences

[0068] The disclosed membrane proteins, polypeptides, peptide fragments, mutated, truncated or deleted forms of the membrane proteins, and/or fusion proteins can be prepared for a variety of uses, including, but not limited to, as protein therapeutics, in the generation of antibodies, as reagents in diagnostic assays, in the identification of other cellular gene products related to a membrane protein, as reagents in assays for screening for compounds that can be used as pharmaceutical reagents useful in the therapeutic treatment of mental, biological, or medical disorders (i.e., kidney disorders, digestive disorders, infertility, improper blood pressure, body weight disorders, etc.) and disease. Given the similarity information and expression data, the described membrane proteins can be targeted (by drugs, oligos, antibodies, etc.) in order to treat disease, or to therapeutically augment the efficacy of therapeutic agents.

[0069] The Sequence Listing discloses the amino acid sequences encoded by the described membrane protein nucleotide sequences. The membrane protein sequences have initiator methionines in DNA sequence contexts consistent with translation initiation sites, in most cases followed by hydrophobic signal sequences typical of membrane-associated proteins or secreted proteins. SEQ ID NO:146 displays an excellent signal sequence, which indicates that this protein may be secreted, membrane-associated, or cytoplasmic, while SEQ ID NOS:149 and 151 display several transmembrane domains, but apparently lack a strong N-terminal signal sequence. SEQ ID NO:154 has an atypical hydrophobic leader sequence. The sequence data presented herein also indicates that alternatively spliced forms of many of the disclosed the membrane proteins exist (which may or may not be tissue specific).

[0070] The amino acid sequences of the invention include the amino acid sequences presented in the Sequence Listing, as well as analogues and derivatives thereof. Further, corresponding membrane protein homologues from other species are encompassed by the invention. In fact, any membrane protein encoded by the membrane protein nucleotide sequences described herein are within the scope of the invention, as are any novel polynucleotide sequences encoding all, or any novel portion, of an amino acid sequence presented in the Sequence Listing. The degenerate nature of the genetic code is well-known, and, accordingly, each amino acid presented in the Sequence Listing is generically representative of the well-known nucleic acid “triplet” codon, or in many cases codons, that can encode the amino acid. As such, as contemplated herein, the amino acid sequences presented in the Sequence Listing, when taken together with the genetic code (see, e.g., “Molecular Cell Biology”, Table 4-1 at page 109 (Darnell et al., eds., Scientific American Books, New York, N.Y., 1986)), are generically representative of all the various permutations and combinations of nucleic acid sequences that can encode such amino acid sequences.

[0071] The invention also encompasses proteins that are functionally equivalent to the membrane proteins encoded by the described nucleotide sequences as judged by any of a number of criteria, including, but not limited to, the ability to bind a ligand of a membrane protein, the ability to effect an identical or complementary signal transduction pathway, a change in cellular metabolism (e.g., ion flux, tyrosine phosphorylation, etc.), or a change in phenotype when the membrane protein equivalent is present in an appropriate cell-type (such as the amelioration, prevention, or delay of a biochemical, biophysical, or overt phenotype). Such functionally equivalent membrane proteins include, but are not limited to, additions or substitutions of amino acid residues within the amino acid sequences encoded by the membrane protein nucleotide sequences described herein, but that result in a silent change, thus producing a functionally equivalent gene product. Amino acid substitutions may be made on the basis of similarity in polarity, charge, solubility, hydrophobicity, hydrophilicity, and/or the amphipathic nature of the residues involved. For example, nonpolar (hydrophobic) amino acids include alanine, leucine, isoleucine, valine, proline, phenylalanine, tryptophan, and methionine; polar neutral amino acids include glycine, serine, threonine, cysteine, tyrosine, asparagine, and glutamine; positively charged (basic) amino acids include arginine, lysine, and histidine; and negatively charged (acidic) amino acids include aspartic acid and glutamic acid.

[0072] While random mutations can be made to a membrane protein DNA (using random mutagenesis techniques well-known to those skilled in the art), and the resulting mutant membrane proteins tested for activity, site-directed mutations of the membrane protein coding sequence can be engineered (using site-directed mutagenesis techniques well-known to those skilled in the art) to generate mutant membrane proteins with increased function (e.g., higher binding affinity for the target ligand and/or greater signaling capacity) or decreased function (e.g., weaker binding affinity for the target ligand and/or decreased signal transduction capacity). One starting point for such analysis is by aligning the disclosed human sequences with corresponding gene/protein sequences from other mammals, for example, in order to identify amino acid sequence motifs that are conserved between different species. Non-conservative changes can be engineered at variable positions to alter function, signal transduction capability, or both. Alternatively, where alteration of function is desired, deletion or non-conservative alterations of the conserved regions (i.e., identical amino acids) can be engineered, for example, deletion or non-conservative alterations (substitutions or insertions) of the various conserved transmembrane domains.

[0073] Other mutations in the membrane protein coding sequence can be made to generate membrane proteins that are better suited for expression, scale up, etc., in the host cells chosen. For example, cysteine residues can be deleted or substituted with another amino acid in order to eliminate disulfide bridges, and N-linked glycosylation sites can be altered or eliminated to achieve, for example, expression of a homogeneous product that is more easily recovered and purified from yeast hosts, which are known to hyperglycosylate N-linked sites. To this end, a variety of amino acid substitutions at one or both of the first or third amino acid positions of any one or more of the glycosylation recognition sequences that occur in the ECD (N-X-S or N-X-T), and/or an amino acid deletion at the second position of any one or more such recognition sequences in the ECD, will prevent glycosylation of a membrane protein at the modified tripeptide sequence (see, e.g., Miyajima et al., EMBO J. 5:1193-1197, 1986).

[0074] Peptides corresponding to one or more domains of the membrane proteins (e.g., ECD, TM, CD, etc.), truncated or deleted membrane proteins (e.g., membrane proteins in which an ECD, TM, and/or CD is deleted), as well as fusion proteins in which a full length membrane protein, a membrane protein peptide, or truncated membrane protein is fused to an unrelated protein, are also within the scope of the invention, and can be designed on the basis of the presently disclosed nucleotide and amino acid sequences. Such fusion proteins include, but are not limited to: IgFc fusions, which stabilize the membrane protein or peptide and prolong half-life in vivo; fusions to any amino acid sequence that allows the fusion protein to be anchored to the cell membrane, allowing an ECD to be exhibited on the cell surface; or fusions to an enzyme, fluorescent protein, or luminescent protein that provides a marker function.

[0075] While the membrane proteins, polypeptides, and peptides can be chemically synthesized (see, e.g., “Proteins: Structures and Molecular Principles” (Creighton, ed., W. H. Freeman & Co., New York, N.Y., 1983)), large polypeptides derived from a membrane protein and full length membrane proteins can be advantageously produced by recombinant DNA technology using techniques well-known in the art for expressing membrane protein gene and/or coding sequences. Such methods can be used to construct expression vectors containing one or more of the presently described membrane protein nucleotide sequences and appropriate transcriptional and translational control signals. These methods include, for example, in vitro recombinant DNA techniques, synthetic techniques, and in vivo genetic recombination (see, e.g., the techniques described in “Molecular Cloning, A Laboratory Manual”, supra, and “Current Protocols in Molecular Biology”, supra). Alternatively, RNA corresponding to all or a portion of a transcript encoded by a membrane protein nucleotide sequence may be chemically synthesized using, for example, synthesizers (see, e.g., the techniques described in “Oligonucleotide Synthesis” (Gait, ed., IRL Press, Oxford, 1984)).

[0076] A variety of host-expression vector systems may be utilized to express the nucleotide sequences of the invention. Where the peptide or polypeptide of the membrane protein is a soluble derivative (e.g., peptides corresponding to an ECD, or truncated or deleted membrane proteins in which a TM and/or CD are deleted), the peptide or polypeptide can be recovered from the culture, i.e., from the host cell in cases where the peptide or polypeptide is not secreted, and from the culture media in cases where the peptide or polypeptide is secreted by the host cell. However, such expression systems also encompass engineered host cells that express a membrane protein, or functional equivalent, in situ, i.e., anchored in the cell membrane. Purification or enrichment of membrane proteins from such expression systems can be accomplished using appropriate detergents and lipid micelles and methods well-known to those skilled in the art. However, such engineered host cells themselves may be used in situations where it is important not only to retain the structural and functional characteristics of the membrane protein, but to assess biological activity, e.g., in certain drug screening assays.

[0077] The expression systems that may be used for purposes of the invention include, but are not limited to, microorganisms such as bacteria (e.g., E. coli, B. subtilis) transformed with recombinant bacteriophage DNA, plasmid DNA or cosmid DNA expression vectors containing membrane protein nucleotide sequences; yeast (e.g., Saccharomyces, Pichia) transformed with recombinant yeast expression vectors containing membrane protein nucleotide sequences; insect cell systems infected with recombinant virus expression vectors (e.g., baculovirus) containing membrane protein nucleotide sequences; plant cell systems infected with recombinant virus expression vectors (e.g., cauliflower mosaic virus, CaMV; tobacco mosaic virus, TMV) or transformed with recombinant plasmid expression vectors (e.g., Ti plasmid) containing membrane protein nucleotide sequences; or mammalian cell systems (e.g., COS, CHO, BHK, 293, 3T3) harboring recombinant expression constructs containing membrane protein nucleotide sequences and promoters derived from the genome of mammalian cells (e.g., metallothionein promoter) or from mammalian viruses (e.g., the adenovirus late promoter or the vaccinia virus 7.5K promoter).

[0078] In bacterial systems, a number of expression vectors may be advantageously selected depending upon the use intended for the membrane protein gene product being expressed. For example, when a large quantity of such a protein is to be produced, such as in the generation of pharmaceutical compositions of a membrane protein or for raising antibodies to a membrane protein, vectors that direct the expression of high levels of fusion protein products that are readily purified may be desirable. Such vectors include, but are not limited to, the E. coli expression vector pUR278 (Ruther and Muller-Hill, EMBO J. 2:1791-1794, 1983), in which a membrane protein coding sequence may be ligated individually into the vector in frame with the lacZ coding region so that a fusion protein is produced; pIN vectors (Inouye and Inouye, Nucl. Acids Res. 13:3101-3109, 1985; Van Heeke and Schuster, J. Biol. Chem. 264:5503-5509, 1989); and the like. pGEX vectors may also be used to express membrane proteins, polypeptides, or peptides, as fusion proteins with glutathione S-transferase (GST) . In general, such fusion proteins are soluble and can easily be purified from lysed cells by adsorption to glutathione-agarose beads followed by elution in the presence of free glutathione. The PGEX vectors are designed to include thrombin or factor Xa protease cleavage sites so that the membrane protein, polypeptide, or peptide, can be released from the GST moiety.

[0079] In an exemplary insect system, Autographa californica nuclear polyhedrosis virus (AcNPV) is used as a vector to express membrane protein nucleotide sequences. The virus grows in Spodoptera frugiperda cells. A membrane protein coding sequence may be cloned individually into a non-essential region (for example the polyhedrin gene) of the virus and placed under control of an AcNPV promoter (for example the polyhedrin promoter). Successful insertion of a membrane protein coding sequence will result in inactivation of the polyhedrin gene and production of non-occluded recombinant virus (i.e., virus lacking the proteinaceous coat coded for by the polyhedrin gene). These recombinant viruses are then used to infect Spodoptera frugiperda cells in which the inserted gene is expressed (see, e.g., Smith et al., J. Virol. 46:584-593, 1983, and U.S. Pat. No. 4,215,051).

[0080] In mammalian host cells, a number of viral-based expression systems may be utilized. In cases where an adenovirus is used as an expression vector, a membrane protein nucleotide sequence may be ligated to an adenovirus transcription/translation control complex, e.g., the late promoter and tripartite leader sequence. This chimeric sequence may then be inserted in the adenovirus genome by in vitro or in vivo recombination. Insertion in a non-essential region of the viral genome (e.g., region E1 or E3) will result in a recombinant virus that is viable and capable of expressing a membrane protein sequence in infected hosts (see, e.g., Logan and Shenk, Proc. Natl. Acad. Sci. USA 81:3655-3659, 1984). Specific initiation signals may also be required for efficient translation of inserted membrane protein nucleotide sequences. These signals include the ATG initiation codon and adjacent sequences. In cases where an entire membrane protein gene or cDNA, including its own initiation codon and adjacent sequences, is inserted into an appropriate expression vector, no additional translational control signals may be needed. However, in cases where only a portion of a membrane protein coding sequence is inserted, exogenous translational control signals, including, perhaps, the ATG initiation codon, may be provided. Furthermore, the initiation codon should be in phase with the reading frame of the desired membrane protein coding sequence to ensure translation of the entire insert. These exogenous translational control signals and initiation codons can be of a variety of origins, both natural and synthetic. The efficiency of expression may be enhanced by the inclusion of appropriate transcription enhancer elements, transcription terminators, etc. (see, e.g., Bitter et al., Methods in Enzymol. 153:516-544, 1987).

[0081] In addition, a host cell strain may be chosen that modulates the expression of the inserted sequences, or modifies and processes the expression product, in the specific fashion desired. Such modifications (e.g., glycosylation) and processing (e.g., cleavage) of protein products may be important for the function of the protein. Different host cells have characteristic and specific mechanisms for the post-translational processing and modification of proteins and gene or expression products. Appropriate cell lines or host systems can be chosen to ensure the correct modification and processing of the foreign protein expressed. To this end, eukaryotic host cells that possess the cellular machinery for proper processing of the primary transcript, glycosylation, and phosphorylation of the gene product may be used. Such mammalian host cells include, but are not limited to, CHO, VERO, BHK, HeLa, COS, MDCK, 293, 3T3, and WI38 cell lines.

[0082] For long-term, high-yield production of recombinant proteins, stable expression is preferred. For example, cell lines that stably express the membrane protein sequences described herein may be engineered. Rather than using expression vectors that contain viral origins of replication, host cells can be transformed with DNA controlled by appropriate expression control elements (e.g., promoter, enhancer sequences, transcription terminators, polyadenylation sites, etc.), and a selectable marker. Following the introduction of the foreign DNA, engineered cells may be allowed to grow for 1-2 days in an enriched media, and then are switched to a selective media. The selectable marker in the recombinant plasmid confers resistance to the selection and allows cells to stably integrate the plasmid into their chromosomes and grow to form foci, which in turn can be cloned and expanded into cell lines. This method may advantageously be used to engineer cell lines that express membrane protein sequences. Such engineered cell lines may be particularly useful in screening and evaluation of compounds that affect the endogenous activity of a membrane protein.

[0083] A number of selection systems may be used, including, but not limited to, the herpes simplex virus thymidine kinase (Wigler et al., Cell 11:223-232, 1977), hypoxanthine-guanine phosphoribosyltransferase (Szybalska and Szybalski, Proc. Natl. Acad. Sci. USA 48:2026-2034, 1962), and adenine phosphoribosyltransferase (Lowy et al., Cell 22:817-823, 1980) genes, which can be employed in tk⁻, hgprt⁻ or aprt⁻ cells, respectively. Also, antimetabolite resistance can be used as the basis of selection for the following genes: dihydrofolate reductase (dhfr), which confers resistance to methotrexate (Wigler et al., Proc. Natl. Acad. Sci. USA 77:3567-3570, 1980, and O'Hare et al., Proc. Natl. Acad. Sci. USA 78:1527-1531, 1981); guanine phosphoribosyl transferase (gpt), which confers resistance to mycophenolic acid (Mulligan and Berg, Proc. Natl. Acad. Sci. USA 78:2072-2076, 1981); neomycin phosphotransferase (neo), which confers resistance to G-418 (Colbere-Garapin et al., J. Mol. Biol. 150:1-14, 1981); and hygromycin B phosphotransferase (hpt), which confers resistance to hygromycin (Santerre et al., Gene 30:147-156, 1984).

[0084] Alternatively, any fusion protein can be readily purified by utilizing an antibody specific for the fusion protein being expressed. For example, one such system allows for the ready purification of non-denatured fusion proteins expressed in human cell lines (Janknecht et al., Proc. Natl. Acad. Sci. USA 88:8972-8976, 1991). In this system, the gene of interest is subcloned into a vaccinia recombination plasmid such that the open reading frame is translationally fused to an amino-terminal tag consisting of six histidine residues. Extracts from cells infected with recombinant vaccinia virus are loaded onto Ni²⁺-nitriloacetic acid-agarose columns, and histidine-tagged proteins are selectively eluted with imidazole-containing buffers.

[0085] Also encompassed by the present invention are fusion proteins that direct a membrane protein to a target organ and/or facilitate transport across the membrane into the cytosol. Conjugation of membrane proteins to antibody molecules, or their Fab fragments, could be used to target cells bearing a particular epitope. Attaching an appropriate signal sequence to a membrane protein would also transport the membrane protein to a desired location within the cell. Alternatively, targeting of membrane proteins or their nucleic acid sequences might be achieved using liposomes or lipid complex based delivery systems. Such technologies are described in “Liposomes: A Practical Approach” (New, R. R. C., ed., IRL Press, New York, N.Y., 1990), and in U.S. Pat. Nos. 4,594,595, 5,459,127, 5,948,767 and 6,110,490.

[0086] Additionally embodied are protein constructs engineered in such a way that they facilitate transport of a membrane protein to a target site or desired organ, where the membrane protein crosses the cell membrane and/or the nucleus and exerts its functional activity. This goal may be achieved by coupling of a membrane protein to a cytokine or other ligand that provides targeting specificity, and/or to a protein transducing domain (see, e.g., U.S. Provisional Patent Application Ser. Nos. 60/111,701 and 60/056,713, for examples of such transducing sequences), to facilitate passage across cellular membranes, and/or can optionally be engineered to include one or more nuclear localization signal(s).

[0087] Additionally contemplated are oligopeptides that are modeled on an amino acid sequence first described in the Sequence Listing. Such oligopeptides are generally between about 10 to about 100 amino acids long, or between about 16 to about 80 amino acids long, or between about 20 to about 35 amino acids long, or any variation or combination of sizes represented therein that incorporate a contiguous region of sequence first disclosed in the Sequence Listing. Such oligopeptides can be of any length disclosed within the above ranges and can initiate at any amino acid position represented in the Sequence Listing.

[0088] The invention also contemplates “substantially isolated” or “substantially pure” proteins or polypeptides. By a “substantially isolated” or “substantially pure” protein or polypeptide is meant a protein or polypeptide that has been separated from at least some of those components which naturally accompany it. Typically, the protein or polypeptide is substantially isolated or pure when it is at least 60%, by weight, free from the proteins and other naturally-occurring organic molecules with which it is naturally associated in vivo. Preferably, the purity of the preparation is at least 75%, more preferably at least 90%, and most preferably at least 99%, by weight. A substantially isolated or pure protein or polypeptide may be obtained, for example, by extraction from a natural source, by expression of a recombinant nucleic acid encoding the protein or polypeptide, or by chemically synthesizing the protein or polypeptide.

[0089] Purity can be measured by any appropriate method, e.g., column chromatography such as immunoaffinity chromatography using an antibody specific for the protein or polypeptide, polyacrylamide gel electrophoresis, or HPLC analysis. A protein or polypeptide is substantially free of naturally associated components when it is separated from at least some of those contaminants which accompany it in its natural state. Thus, a polypeptide which is chemically synthesized or produced in a cellular system different from the cell from which it naturally originates will be, by definition, substantially free from its naturally associated components. Accordingly, substantially isolated or pure proteins or polypeptides include eukaryotic proteins synthesized in E. coli, other prokaryotes, or any other organism in which they do not naturally occur.

### 7.3 Antibodies to Membrane Proteins

[0090] Antibodies that specifically recognize one or more epitopes of the disclosed membrane proteins, conserved variants of the disclosed membrane proteins, or peptide fragments of the disclosed membrane proteins, are also encompassed by the present invention. Such antibodies include, but are not limited to, polyclonal antibodies, monoclonal antibodies (mAbs), humanized or chimeric antibodies, single chain antibodies, Fab fragments, F(ab′)₂ fragments, fragments produced by a Fab expression library, anti-idiotypic (anti-Id) antibodies, and epitope-binding fragments of any of the above.

[0091] The antibodies of the invention may be used, for example, in the detection of the disclosed membrane proteins in a biological sample and may, therefore, be utilized as part of a diagnostic or prognostic technique whereby patients may be tested for abnormal amounts of one or more of the disclosed membrane proteins. Such antibodies may also be utilized in conjunction with, for example, compound screening schemes, as described herein, for the evaluation of the effect of test compounds on expression and/or activity of the disclosed membrane proteins. Additionally, such antibodies can be used in conjunction with gene therapy to, for example, evaluate the normal and/or engineered membrane protein-expressing cells prior to their introduction into a patient. Such antibodies may additionally be used as a method for the inhibition of abnormal membrane protein activity. Thus, such antibodies may be utilized as part of a variety of therapeutic regimens, such as, for example, in kidney disorder, digestive disorder, infertility, improper blood pressure, and/or body weight disorder treatment methods.

[0092] For the production of antibodies, various host animals may be immunized by injection with a disclosed membrane protein, one or more peptide from a membrane protein (e.g., one corresponding to a functional domain of the protein, such as an ECD, TM or CD), truncated membrane protein polypeptide(s) (membrane proteins in which one or more domains, e.g., a TM or CD, has been deleted), functional equivalents of a membrane protein, or mutant versions of a membrane protein. Such host animals may include, but are not limited to, rabbits, mice, and rats, to name but a few.

[0093] Various adjuvants may be used to increase the immunological response, depending on the host species, including, but not limited to, Freund's adjuvant (complete and incomplete), mineral salts such as aluminum hydroxide or aluminum phosphate, chitosan, surface active substances such as lysolecithin, pluronic polyols, polyanions, peptides, oil emulsions, and potentially useful human adjuvants such as BCG (bacille Calmette-Guerin) and Corynebacterium parvum. Alternatively, the immune response could be enhanced by combination and/or coupling with molecules such as keyhole limpet hemocyanin, tetanus toxoid, diphtheria toxoid, ovalbumin, cholera toxin, or fragments thereof.

[0094] Polyclonal antibodies are heterogeneous populations of antibody molecules derived from the sera of the immunized animals. Monoclonal antibodies, which are homogeneous populations of antibodies to a particular antigen, may be obtained by any technique that provides for the production of antibody molecules by continuous cell lines in culture. These include, but are not limited to, the hybridoma technique (Kohler and Milstein, Nature 256:495-497, 1975, and U.S. Pat. No. 4,376,110), the human B-cell hybridoma technique (Kosbor et al., Immunology Today 4:72, 1983, and Cole et al., Proc. Natl. Acad. Sci. USA 80:2026-2030, 1983), and the EBV-hybridoma technique (Cole et al., in “Monoclonal Antibodies and Cancer Therapy”, Vol. 27, UCLA Symposia on Molecular and Cellular Biology, New Series, pp. 77-96 (Reisfeld and Sell, eds., Alan R. Liss, Inc. New York, N.Y., 1985)). Such antibodies may be of any immunoglobulin class, including IgG, IgM, IgE, IgA, IgD, and any subclass thereof. The hybridomas producing the mAbs of this invention may be cultivated in vitro or in vivo. Production of high titers of mAbs in vivo makes this the presently preferred method of production.

[0095] In addition, techniques developed for the production of “chimeric antibodies” (Morrison et al., Proc. Natl. Acad. Sci. USA 81:6851-6855, 1984, Neuberger et al., Nature 312:604-608, 1984, and Takeda et al., Nature 314:452-454, 1985), by splicing the genes from a mouse antibody molecule of appropriate antigen specificity together with genes from a human antibody molecule of appropriate biological activity, can be used. A chimeric antibody is a molecule in which different portions are derived from different animal species, such as those having a variable region derived from a murine mAb and a human immunoglobulin constant region. Such technologies are described in U.S. Pat. Nos. 6,075,181 and 5,877,397. Also encompassed by the present invention is the use of fully humanized monoclonal antibodies, as described in U.S. Pat. No. 6,150,584.

[0096] Alternatively, techniques described for the production of single chain antibodies (U.S. Pat. No. 4,946,778, Bird, Science 242:423-426, 1988, Huston et al., Proc. Natl. Acad. Sci. USA 85:5879-5883, 1988, and Ward et al., Nature 341:544-546, 1989) can be adapted to produce single chain antibodies against membrane proteins, polypeptides, and/or peptides. Single chain antibodies are formed by linking the heavy and light chain fragments of the Fv region via an amino acid bridge, resulting in a single chain polypeptide.

[0097] Antibody fragments that recognize specific epitopes may be generated by known techniques. For example, such fragments include, but are not limited to: F(ab′)₂ fragments, which can be produced by pepsin digestion of an antibody molecule; and Fab fragments, which can be generated by reducing the disulfide bridges of F(ab′)₂ fragments. Alternatively, Fab expression libraries may be constructed (Huse et al., Science 246:1275-1281, 1989), to allow rapid and easy identification of monoclonal Fab fragments with the desired specificity.

[0098] Antibodies to the disclosed membrane proteins can, in turn, be utilized to generate anti-idiotype antibodies that “mimic” a given membrane protein, using techniques well-known to those skilled in the art (see, e.g., Greenspan and Bona, FASEB J. 7:437-444, 1993, and Nissinoff, J. Immunol. 147:2429-2438, 1991). For example antibodies that bind to an ECD of a membrane protein and competitively inhibit the binding of a ligand can be used to generate anti-idiotypes that “mimic” the ECD and, therefore, bind and neutralize the ligand. Such neutralizing anti-idiotypes, or Fab fragments of such anti-idiotypes, can be used in therapeutic regimens involving the membrane protein signaling pathway.

[0099] Additionally, given the high degree of relatedness of the disclosed membrane proteins across mammalian species, the presently described knock-out mice (having never seen the corresponding homologous membrane protein, and thus never been tolerized to the corresponding homologous membrane protein), have a unique utility, as they can be advantageously applied to the generation of antibodies against the disclosed mammalian membrane proteins (i.e., any of the disclosed membrane proteins will be immunogenic in the corresponding knock-out animals).

### 7.4 Diagnosis of Abnormalities Related to the Disclosed Proteins

[0100] A variety of methods can be employed for the diagnostic and prognostic evaluation of disorders related to the function of the disclosed membrane proteins, and for the identification of subjects having a predisposition to such disorders.

[0101] Such methods can, for example, utilize reagents such as the membrane protein nucleotide sequences described in Section 7.1, and/or membrane protein antibodies as described in Section 7.3. Specifically, such reagents may be used, for example, for: (1) the detection of the presence of membrane protein gene mutations, or the detection of either over- or under-expression of membrane protein mRNA relative to a given (i.e., normal) phenotype; (2) the detection of either an over- or an under-abundance of a membrane protein relative to a given (i.e., normal) phenotype; and (3) the detection of perturbations or abnormalities in a signal transduction pathway mediated by a membrane protein.

[0102] The methods described herein may be performed, for example, by utilizing pre-packaged diagnostic kits comprising at least one specific membrane protein nucleotide sequence and/or membrane protein antibody reagent described herein, which may be conveniently used, e.g., in clinical settings to diagnose patients exhibiting medical disorders or abnormalities, such as, for example, kidney disorders, digestive disorders, infertility, improper blood pressure, and/or body weight disorders.

[0103] For the detection of membrane protein mutations, any nucleated cell can be used as a starting source for genomic nucleic acid. For the detection of membrane protein gene expression or gene products, any cell-type or tissue in which a membrane protein gene is expressed can be utilized.

[0104] Nucleic acid-based detection techniques and peptide detection techniques are described in greater detail below.

### 7.4.1 Detection of Membrane Protein Genes and Transcripts

[0105] Mutations within a membrane protein gene or nucleotide sequence can be detected by utilizing a number of techniques. Nucleic acids from any nucleated cell can be used as the starting point for such assay techniques, and may be isolated according to standard nucleic acid preparation procedures that are well-known to those of skill in the art.

[0106] DNA may be used in hybridization or amplification assays of biological samples to detect abnormalities involving membrane protein gene structure, including point mutations, insertions, deletions and chromosomal rearrangements. Such assays may include, but are not limited to, Southern analyses, single stranded conformational polymorphism analyses, RFLP analyses (as generally described in U.S. Pat. No. 5,272,057), coding single nucleotide polymorphism analyses, and PCR analyses.

[0107] Such diagnostic methods for the detection of membrane protein gene-specific mutations can involve, for example, contacting and incubating nucleic acids, including recombinant DNA molecules, cloned genes, or degenerate variants thereof, obtained from a sample, e.g., derived from a patient sample or other appropriate cellular source, with one or more labeled nucleic acid reagents, including recombinant DNA molecules, cloned genes or degenerate variants thereof, as described in Section 7.1, under conditions favorable for the specific annealing of these reagents to their complementary sequences within a given membrane protein gene or sequence. Preferably, the lengths of these nucleic acid reagents are at least 15 to 30 nucleotides. After incubation, all non-annealed nucleic acids are removed from the nucleic acid:membrane protein molecule hybrid. The presence of nucleic acids that have hybridized, if any such molecules exist, is then detected. In conjunction with such a detection scheme, the nucleic acid from the cell-type or tissue of interest can be immobilized, for example, to a solid support such as a membrane, or a plastic surface such as that on a microtiter plate or polystyrene beads. In such a case, after incubation, non-annealed, labeled nucleic acid reagents of the type described in Section 7.1 are easily removed. Detection of the remaining, annealed, labeled membrane protein nucleic acid reagents is accomplished using standard techniques well-known to those in the art. The membrane protein sequences to which the nucleic acid reagents have annealed can be compared to the annealing pattern expected from a normal membrane protein sequence in order to determine whether a membrane protein mutation is present.

[0108] Alternative diagnostic methods for the detection of membrane protein gene specific nucleic acid molecules, in patient samples or other appropriate cell sources, may involve their amplification, e.g., by PCR (see, e.g., U.S. Pat. Nos. 4,683,195; 4,683,202 and 4,800,159), followed by the detection of the amplified molecules using techniques well-known to those of skill in the art. The resulting amplified sequences can be compared to those that would be expected if the nucleic acid being amplified contained only normal copies of a membrane protein gene in order to determine whether a membrane protein gene mutation exists.

[0109] Well-known genotyping techniques can also be performed to identify individuals carrying membrane protein gene mutations. Such techniques include, for example, the use of RFLPs, which involve sequence variations in one of the recognition sites for the specific restriction enzyme used. Additionally, improved methods for analyzing DNA polymorphisms that can be utilized for the identification of membrane protein gene mutations have been described, which capitalize on the presence of variable numbers of short, tandemly repeated DNA sequences between restriction enzyme sites. For example, U.S. Pat. No. 5,075,217 describes a DNA marker based on length polymorphisms in blocks of (dC-dA)ₙ-(dG-dT)ₙ short tandem repeats. The average separation of (dC-dA)ₙ-(dG-dT)ₙ blocks is estimated to be 30,000-60,000 bp. Markers that are so closely spaced exhibit a high frequency co-inheritance, and are extremely useful in the identification of genetic mutations, such as, for example, mutations within a given membrane protein gene, and the diagnosis of diseases and disorders related to membrane protein mutations. U.S. Pat. No. 5,364,759 describes a DNA profiling assay for detecting short tri- and tetra-nucleotide repeat sequences. The process includes extracting the DNA of interest, such as the membrane protein gene, amplifying the extracted DNA, and labeling the repeat sequences to form a genotypic map of the individual's DNA.

[0110] The level of membrane protein gene expression can also be assayed by detecting and measuring transcription levels. For example, RNA from a cell-type or tissue known to express, or suspected of expressing, a membrane protein gene can be isolated and tested utilizing hybridization or PCR techniques such as those described herein. The isolated cells can be derived from cell culture or from a patient. The analysis of cells taken from culture may be a necessary step in the assessment of cells to be used as part of a cell-based gene therapy technique or, alternatively, to test the effect of compounds on the expression of a membrane protein gene. Such analyses may reveal both quantitative and qualitative aspects of the expression pattern of a membrane protein gene, including activation or inactivation of membrane protein gene expression.

[0111] In one embodiment of such a detection scheme, cDNAs are synthesized from the RNAs of interest (e.g., by reverse transcription of the RNA molecule into cDNA). A sequence within the cDNA is then used as the template for a nucleic acid amplification reaction, such as a PCR amplification reaction, or the like. The nucleic acid reagents used as synthesis initiation reagents (e.g., primers) in the reverse transcription and nucleic acid amplification steps of this method are chosen from among the membrane protein nucleic acid reagents described in Section 7.1. The preferred lengths of such nucleic acid reagents are at least 9-30 nucleotides. For detection of the amplified product, the nucleic acid amplification may be performed using radioactively or non-radioactively labeled nucleotides. Alternatively, enough amplified product may be made such that the product may be visualized by standard ethidium bromide staining or any other suitable nucleic acid staining method, or by sequencing.

[0112] It is also possible to perform such membrane protein gene expression assays “in situ”, i.e., directly upon tissue sections (fixed and/or frozen) of patient tissue obtained from biopsies or resections, such that no nucleic acid purification is necessary. Nucleic acid reagents, such as those described herein, may be used as probes and/or primers for such in situ procedures (see, e.g., “PCR In Situ Hybridization: Protocols And Applications” (Nuovo, ed., Raven Press, New York, N.Y., 1992)). Alternatively, if a sufficient quantity of the appropriate cells can be obtained, standard Northern analysis can be performed to determine the level of membrane protein mRNA expression.

[0113] Additionally, membrane protein oligonucleotide or polynucleotide sequences can be used as hybridization probes in conjunction with a solid support matrix/substrate (e.g., resins, beads, membranes, plastics, polymers, metal or metallized substrates, gene chips, and crystalline or polycrystalline substrates, etc.).

### 7.4.2 Detection of Membrane Protein Products

[0114] Antibodies directed against wild-type or mutant membrane proteins, or conserved variants or peptide fragments thereof, which are discussed above, may also be used as diagnostics and prognostics, as described herein. Such diagnostic methods may be used to detect abnormalities in the level of membrane protein gene expression, or abnormalities in the structure and/or temporal, tissue, cellular, or subcellular location of a membrane protein, and may be performed in vivo or in vitro, such as, for example, on biopsy tissue.

[0115] For example, antibodies directed to epitopes of an ECD of a membrane protein can be used in vivo to detect the pattern and level of expression of the particular membrane protein in the body. Such antibodies can be labeled, e.g., with a radio-opaque or other appropriate compound, and injected into a subject in order to visualize binding to membrane proteins in the body, using methods such as X-rays, CAT-scans, or MRI. Labeled antibody fragments, e.g., the Fab or single chain antibody comprising the smallest portion of the antigen binding region, are preferred for this purpose, in order to promote crossing the blood-brain barrier and permit labeling of membrane proteins expressed in the brain.

[0116] Additionally, any membrane protein fusion or conjugated protein whose presence can be detected can be administered. For example, membrane protein fusion or conjugated proteins labeled with a radio-opaque or other appropriate compound can be administered and visualized in vivo, as discussed above for labeled antibodies. Further, fusion proteins such as alkaline phosphatase-membrane protein or membrane protein-alkaline phosphatase can be utilized for in vitro diagnostic procedures.

[0117] Alternatively, immunoassays or fusion protein detection assays, as described herein, can be utilized on biopsy and autopsy samples in vitro to permit assessment of the expression pattern of a membrane protein. Such assays are not confined to the use of antibodies that define an ECD of a membrane protein, but can include the use of antibodies directed to epitopes of any of the domains of a membrane protein, e.g., the ECD, the TM and/or CD. The use of each or all of these labeled antibodies will yield useful information regarding translation and intracellular transport of a membrane protein to the cell surface, and can identify defects in processing.

[0118] The tissue or cell-type to be analyzed will generally include those that are known to express, or suspected of expressing, a membrane protein gene. The protein isolation methods employed herein may, for example, be such as those previously described (“Antibodies: A Laboratory Manual”, supra). The isolated cells can be derived from cell culture or a patient. The analysis of cells taken from culture may be a necessary step in the assessment of cells that could be used as part of a cell-based gene therapy technique or, alternatively, to test the effect of compounds on the expression of a membrane protein gene.

[0119] For example, antibodies, or fragments of antibodies, such as those described in Section 7.3, may be used to quantitatively or qualitatively detect the presence of membrane proteins, or conserved variants or peptide fragments thereof. This can be accomplished, for example, by immunofluorescence techniques employing a fluorescently labeled antibody (see below, this Section), coupled with light microscopic, flow cytometric, or fluorimetric detection. Such techniques are especially preferred if such membrane proteins are expressed on the cell surface.

[0120] The antibodies (or fragments thereof), or membrane protein fusion or conjugated proteins, may additionally be employed histologically, as in immunofluorescence, immunoelectron microscopy or non-immuno assays, for in situ detection of membrane proteins, or conserved variants or peptide fragments thereof, or for membrane protein binding (in the case of labeled membrane protein ligand fusion proteins).

[0121] In situ detection may be accomplished by removing a histological specimen from a patient, and applying thereto a labeled antibody or fusion protein of the present invention. The antibody (or fragment) or fusion protein is preferably applied by overlaying the labeled moiety onto a biological sample. Through the use of such a procedure, it is possible to determine not only the presence of a membrane protein, or conserved variants or peptide fragments, or membrane protein binding, but also membrane protein distribution in the examined tissue. Using the present invention, those of ordinary skill will readily perceive that any of a wide variety of histological methods (such as staining procedures) can be modified in order to achieve such in situ detection.

[0122] Immunoassays and non-immunoassays for membrane proteins, or conserved variants or peptide fragments thereof, will typically comprise incubating a sample, such as a biological fluid, a tissue extract, freshly harvested cells, or lysates of cells that have been incubated in cell culture, in the presence of a detectably labeled antibody or fusion protein capable of identifying a membrane protein, or conserved variants or peptide fragments thereof, and detecting the bound antibody or fusion protein by any of a number of techniques well-known in the art.

[0123] The biological sample may be brought in contact with and immobilized onto a solid phase support or carrier, such as nitrocellulose or any other solid support that is capable of immobilizing cells, cell particles, or soluble proteins. The support may then be washed with suitable buffers, followed by treatment with the detectably labeled membrane protein antibody or membrane protein ligand fusion protein. The solid phase support may then be washed with the buffer a second time to remove unbound antibody or fusion protein. The amount of bound label remaining on the solid support may then be detected by conventional means.

[0124] By “solid phase support or carrier” is intended any support capable of binding an antigen or an antibody. Well-known supports or carriers include, but are not limited to, glass, polystyrene, polypropylene, polyethylene, dextran, nylon, amylases, natural and modified celluloses, polyacrylamides, gabbros, and magnetite. The nature of the carrier can be either soluble to some extent or insoluble for the purposes of the present invention. The support material can have virtually any possible structural configuration so long as the coupled molecule is capable of binding to an antigen or antibody. Thus, the support configuration may be spherical, as in a bead, or cylindrical, as in the inside surface of a test tube, or the external surface of a rod. Alternatively, the surface may be flat, such as a sheet or test strip. Preferred supports include polystyrene beads. Those skilled in the art will know many other suitable carriers for binding an antibody or antigen, or will be able to ascertain the same by use of routine experimentation.

[0125] The binding activity of a given lot of membrane protein antibody or membrane protein ligand fusion protein may be determined according to well-known methods. Those skilled in the art will be able to determine operative and optimal assay conditions for each determination by employing routine experimentation.

[0126] With respect to antibodies, one of the ways in which a membrane protein antibody can be detectably labeled is by linking it to an enzyme for use in an enzyme immunoassay (Voller, Diagnostic Horizons 2:1-7, 1978; Voller et al., J. Clin. Pathol. 31:507-520, 1978; Butler, Meth. Enzymol. 73:482-523, 1981; 1980, “Enzyme Immunoassay” (Maggio, E., ed., CRC Press, Boca Raton, Fla., 1980); and “Enzyme Immunoassay” (Ishikawa et al., eds., Igaku-Shoin, Tokyo, Japan, 1981)). The enzyme that is bound to the antibody will react with an appropriate substrate, preferably a chromogenic substrate, in such a manner as to produce a chemical moiety that can be detected, for example, by spectrophotometric, fluorimetric, or visual means. Enzymes that can be used to detectably label the antibody include, but are not limited to, malate dehydrogenase, staphylococcal nuclease, delta-5-steroid isomerase, yeast alcohol dehydrogenase, alpha-glycerophosphate, dehydrogenase, triose phosphate isomerase, horseradish peroxidase, alkaline phosphatase, asparaginase, glucose oxidase, beta-galactosidase, ribonuclease, urease, catalase, glucose-6-phosphate dehydrogenase, glucoamylase and acetylcholinesterase. The detection can be accomplished by calorimetric methods, which employ a chromogenic substrate for the enzyme. Detection may also be accomplished by visual comparison of the extent of enzymatic reaction of a substrate in comparison with similarly prepared standards.

[0127] Detection may also be accomplished using any of a variety of other immunoassays. For example, by radioactively labeling the antibodies or antibody fragments it is possible to detect a membrane protein through the use of a radioimmunoassay (see, e.g., “Principles of Radioimmunoassays” (Weintraub, B., ed., Seventh Training Course on Radioligand Assay Techniques, The Endocrine Society, Chevy Chase, Md., March, 1986)). The radioactive isotope can be detected by such means as the use of a gamma counter, a scintillation counter, or by autoradiography.

[0128] It is also possible to label the antibody with a fluorescent compound. When the fluorescently labeled antibody is exposed to light of the proper wavelength, its presence can be detected due to fluorescence. Among the most commonly used fluorescent labeling compounds are fluorescein isothiocyanate, rhodamine, phycoerythrin, phycocyanin, allophycocyanin, o-phthaldehyde and fluorescamine. The antibody can also be detectably labeled using fluorescence emitting metals such as ¹⁵²Eu, or others of the lanthanide series. These metals can be attached to the antibody using such metal chelating groups as diethylenetriaminepentacetic acid or ethylenediaminetetraacetic acid.

[0129] The antibody also can be detectably labeled by coupling it to a chemiluminescent compound. The presence of the chemiluminescent-tagged antibody is then determined by detecting the presence of luminescence that arises during the course of a chemical reaction. Examples of particularly useful chemiluminescent labeling compounds are luminol, isoluminol, theromatic acridinium ester, imidazole, acridinium salt and oxalate ester.

[0130] Likewise, a bioluminescent compound may be used to label the antibodies (or fragments thereof) of the present invention. Bioluminescence is a type of chemiluminescence found in biological systems, in which a catalytic protein increases the efficiency of the chemiluminescent reaction. The presence of a bioluminescent protein is determined by detecting the presence of luminescence. Important bioluminescent compounds for purposes of labeling are luciferin, luciferase, and aequorin (green fluorescent protein and mutants thereof, as described in U.S. Pat. Nos. 5,491,084, 5,625,048, 5,777,079, 5,795,737, 5,804,387, 5,874,304, 5,968,750, 5,976,796, 6,020,192, 6,027,881, 6,054,321, 6,096,865, 6,146,826, 6,172,188 and 6,265,548).

### 7.5 Screening Assays for Compounds That Modulate Membrane Protein Expression or Activity

[0131] The following assays are designed to identify: compounds that interact with (e.g., bind to) membrane proteins (including, but not limited to, an ECD or CD of a membrane protein); intracellular proteins that interact with a membrane protein (including, but not limited to, a TM or CD of a membrane protein); compounds that interfere with the interaction of a membrane protein with transmembrane or intracellular proteins involved in membrane protein-mediated signal transduction; and compounds that modulate the activity of a membrane protein gene (i.e., modulate the level of membrane protein gene expression) or modulate the level of a membrane protein. Assays may additionally be utilized that identify compounds that bind to membrane protein gene regulatory sequences (e.g., promoter sequences), and may modulate membrane protein gene expression (see, e.g., Platt et al., J. Biol. Chem. 269:28558-28562, 1994).

[0132] The compounds that can be screened in accordance with the invention include, but are not limited to, peptides, antibodies and fragments thereof, and other organic compounds (e.g., peptidomimetics) that bind to an ECD of a membrane protein, and either mimic the activity triggered by the natural ligand (i.e., agonists) or inhibit the activity triggered by the natural ligand (i.e., antagonists); as well as peptides, antibodies or fragments thereof, and other organic compounds that mimic the ECD of a membrane protein (or a portion thereof) and bind to and “neutralize” a natural ligand of the membrane protein.

[0133] Such compounds may include, but are not limited to, peptides, such as, for example, soluble peptides, including, but not limited to, members of random peptide libraries (see, e.g., Lam et al., Nature 354:82-84, 1991, and Houghten et al., Nature 354:84-86, 1991), and combinatorial chemistry-derived molecular libraries made of D- and/or L-configuration amino acids, phosphopeptides (including, but not limited to, members of random or partially degenerate, directed phosphopeptide libraries; see, e.g., Songyang et al., Cell 72:767-778, 1993), antibodies (including, but not limited to, polyclonal, monoclonal, humanized, anti-idiotypic, chimeric, or single chain antibodies, and Fab, F(ab′)₂ and Fab expression library fragments, and epitope-binding fragments thereof), and small organic or inorganic molecules.

[0134] Other compounds that can be screened in accordance with the invention include, but are not limited to, small organic molecules that are able to cross the blood-brain barrier, gain entry into an appropriate cell (e.g., in the cerebellum, the hypothalamus, etc.), and affect the expression of a membrane protein gene or some other gene involved in the membrane protein signal transduction pathway (e.g., by interacting with the regulatory region or transcription factors involved in gene expression); or such compounds that affect the activity of a membrane protein (e.g., by inhibiting or enhancing the enzymatic activity of a CD) or the activity of some other intracellular factor involved in the membrane protein signal transduction pathway.

[0135] Computer modeling and searching technologies permit identification of compounds, or the improvement of already identified compounds, that can modulate membrane protein expression or activity. Having identified such a compound or composition, the active sites or regions are identified. Such active sites might typically be ligand binding sites. The active site can be identified using methods known in the art including, for example, from the amino acid sequences of peptides, from the nucleotide sequences of nucleic acids, or from study of complexes of the relevant compound or composition with its natural ligand. In the latter case, chemical or X-ray crystallographic methods can be used to find the active site by finding where on the factor the complexed ligand is found.

[0136] Next, the three dimensional geometric structure of the active site is determined. This can be done by known methods, including X-ray crystallography, which can determine a complete molecular structure. On the other hand, solid or liquid phase NMR can be used to determine certain intra-molecular distances. Any other experimental method of structure determination can be used to obtain partial or complete geometric structures. The geometric structures may be measured with a complexed ligand, natural or artificial, which may increase the accuracy of the active site structure determined.

[0137] If an incomplete or insufficiently accurate structure is determined, the methods of computer based numerical modeling can be used to complete the structure or improve its accuracy. Any recognized modeling method may be used, including parameterized models specific to particular biopolymers such as proteins or nucleic acids, molecular dynamics models based on computing molecular motions, statistical mechanics models based on thermal ensembles, or combined models. For most types of models, standard molecular force fields, representing the forces between constituent atoms and groups, are necessary, and can be selected from force fields known in physical chemistry. The incomplete or less accurate experimental structures can serve as constraints on the complete and more accurate structures computed by such modeling methods.

[0138] Finally, having determined the structure of the active site, either experimentally, by modeling, or by a combination thereof, candidate modulating compounds can be identified by searching databases containing compounds along with information on their molecular structure. Such a search seeks compounds having structures that match the determined active site structure and that interact with the groups defining the active site. Such a search can be manual, but is preferably computer assisted. The compounds found from such a search are potential membrane protein modulating compounds.

[0139] Alternatively, these methods can be used to identify improved modulating compounds from an already known modulating compound or ligand. The composition of the known compound can be modified, and the structural effects of modification can be determined using the experimental and computer modeling methods described above applied to the new composition. The altered structure is then compared to the active site structure of the compound to determine if an improved fit or interaction results. In this manner systematic variations in composition, such as by varying side groups, can be quickly evaluated to obtain modified modulating compounds or ligands of improved specificity or activity. Further experimental and computer modeling methods useful to identify modulating compounds based upon identification of the active sites of a membrane protein, and related transduction and transcription factors, will be apparent to those of skill in the art.

[0140] Examples of molecular modeling systems are the CHARMM and QUANTA programs (Polygen Corporation, Waltham, Mass.). CHARMM performs the energy minimization and molecular dynamics functions, while QUANTA performs the construction, graphic modeling and analysis of molecular structure. QUANTA allows interactive construction, modification, visualization, and analysis of the behavior of molecules with each other.

[0141] A number of articles review computer modeling of drugs interactive with specific proteins, such as: Rotivinen et al., Acta Pharmaceutical Fennica 97:159-166, 1988, Ripka, New Scientist, pp. 54-57, June 16, 1988, McKinaly and Rossmann, Ann. Rev. Pharmacol. Toxiciol. 29:111-122, 1989, Perry and Davies, in “QSAR: Quantitative Structure-Activity Relationships in Drug Design”, pp. 189-193 (Fauchere, ed., Alan R. Liss, Inc., New York, N.Y., 1989), Lewis and Dean, Proc. R. Soc. Lond. 236:125-140 and 141-162, 1989; and, with respect to a model receptor for nucleic acid components, Askew et al., J. Am. Chem. Soc. 111:1082-1090, 1989. Other computer programs that screen and graphically depict chemicals are available from companies such as BioDesign, Inc. (Pasadena, Calif.), Allelix, Inc. (Mississauga, Ontario, Canada), and Hypercube, Inc. (Cambridge, Ontario). Although these are primarily designed for application to drugs specific to particular proteins, they can be adapted to the design of drugs specific to membrane proteins, or regions of DNA or RNA, once that region is identified.

[0142] Although described above with reference to design and generation of compounds that could alter binding, one could also screen libraries of known compounds, including natural products or synthetic chemicals, and biologically active materials, including proteins, for compounds that are inhibitors or activators.

[0143] Cell-based systems can also be used to identify compounds that bind membrane proteins, as well as assess the altered activity associated with such binding in living cells. One tool of particular interest for such assays is green fluorescent protein, which is described, inter alia, in U.S. Pat. No. 5,625,048. Cells that may be used in such cellular assays include, but are not limited to, leukocytes, or cell lines derived from leukocytes, lymphocytes, stem cells, including embryonic stem cells, and the like. In addition, expression host cells (e.g., B95 cells, COS cells, CHO cells, OMK cells, fibroblasts, Sf9 cells) genetically engineered to express a functional membrane protein of interest and to respond to activation by the test, or natural, ligand, as measured by a chemical or phenotypic change, or induction of another host cell gene, can be used as an end point in the assay.

### 7.5.1 In Vitro Screening Assays for Compounds That Bind to Membrane Proteins

[0144] In vitro systems can be designed to identify compounds capable of interacting with (e.g., binding to) a membrane protein (including, but not limited to, an ECD or CD of a membrane protein). Compounds identified may be useful, for example, in modulating the activity of wild-type and/or mutant membrane proteins, in elaborating a biological function of a membrane protein, in screens for identifying compounds that disrupt normal membrane protein interactions, or may in themselves disrupt such interactions.

[0145] The principle of the assays used to identify compounds that bind to a membrane protein involves preparing a reaction mixture of a membrane protein and a test compound under conditions and for a time sufficient to allow the two components to interact and bind, thus forming a complex that can be removed and/or detected in the reaction mixture. The membrane protein species used can vary depending upon the goal of the screening assay. For example, where agonists of the natural ligand are sought, the full length membrane protein, a soluble truncated membrane protein, e.g., in which the TM and/or CD is deleted from the molecule, a peptide corresponding to an ECD, or a fusion protein containing one or more ECD fused to a protein or polypeptide that affords advantages in the assay system (e.g., labeling, isolation of the resulting complex, etc.), can be utilized. Where compounds that interact with the CD are sought to be identified, peptides corresponding to a membrane protein CD or fusion proteins containing a membrane protein CD can be used.

[0146] The screening assays can be conducted in a variety of ways. For example, one method to conduct such an assay would involve anchoring the membrane protein, polypeptide, peptide, or fusion protein, or the test substance, onto a solid phase and detecting membrane protein/test compound complexes anchored on the solid phase at the end of the reaction. In one embodiment of such a method, the membrane protein reactant may be anchored onto a solid surface, and the test compound, which is not anchored, may be labeled, either directly or indirectly. Examples of some of the technologies available to immobilize the molecules are discussed in “Immobilized Biomolecules In Analysis: A Practical Approach” (Cass and Ligler, eds., Oxford University Press, New York, N.Y., 1999).

[0147] In practice, microtiter plates may conveniently be utilized as the solid phase. The anchored component may be immobilized by non-covalent or covalent attachments. Non-covalent attachment may be accomplished by simply coating the solid surface with a solution of the protein and drying. Alternatively, an immobilized antibody, preferably a monoclonal antibody specific for the protein to be immobilized, may be used to anchor the protein to the solid surface. The surfaces may be prepared in advance and stored.

[0148] In order to conduct the assay, the non-immobilized component is added to the coated surface containing the anchored component. After the reaction is complete, unreacted components are removed (e.g., by washing) under conditions such that any complexes formed will remain immobilized on the solid surface. The detection of complexes anchored on the solid surface can be accomplished in a number of ways. Where the previously non-immobilized component is pre-labeled, the detection of label immobilized on the surface indicates that complexes were formed. Where the previously non-immobilized component is not pre-labeled, an indirect label can be used to detect complexes anchored on the surface, e.g., using a labeled antibody specific for the previously non-immobilized component (the antibody, in turn, may be directly labeled or indirectly labeled with a labeled anti-Ig antibody).

[0149] Alternatively, a reaction can be conducted in a liquid phase, the reaction products separated from unreacted components, and complexes detected, e.g., using an immobilized antibody specific for a membrane protein, polypeptide, peptide, or fusion protein, or the test compound, to anchor any complexes formed in solution, and a labeled antibody specific for the other component of the possible complex to detect anchored complexes.

[0150] Alternatively, cell-based assays can be used to identify compounds that interact with a membrane protein. To this end, cell lines that express a membrane protein, or cell lines (e.g., COS cells, CHO cells, fibroblasts, etc.) that have been genetically engineered to express a membrane protein (e.g., by transfection or transduction of membrane protein DNA sequence) can be used. Interaction of the test compound with, for example, an ECD of a membrane protein expressed by the host cell can be determined by comparison or competition with native ligand.

### 7.5.2 Assays for Intracellular Proteins That Interact With Membrane Proteins

[0151] Any method suitable for detecting protein-protein interactions may be employed for identifying transmembrane proteins or intracellular proteins that interact with a membrane protein. Among the traditional methods that may be employed are co-immunoprecipitation, crosslinking and co-purification through gradients or chromatographic columns of cell lysates, or proteins obtained from cell lysates, and a membrane protein to identify proteins in the lysate that interact with the membrane protein. For these assays, the membrane protein component used can be a full length membrane protein, a soluble derivative lacking the membrane-anchoring region (e.g., a truncated membrane protein in which a TM is deleted resulting in a truncated molecule containing an ECD fused to a CD), a peptide corresponding to a CD, or a fusion protein containing a CD of a membrane protein. Once isolated, such an intracellular protein can be identified and can, in turn, be used in conjunction with standard techniques to identify proteins with which it interacts. For example, at least a portion of the amino acid sequence of an intracellular protein that interacts with a membrane protein can be ascertained using techniques well-known to those of skill in the art, such as via the Edman degradation technique (see, e.g., “Proteins: Structures and Molecular Principles”, pp.34-49, supra). The amino acid sequence obtained may be used as a guide for the generation of oligonucleotide mixtures that can be used to screen for nucleotide sequences encoding such intracellular proteins. Screening can be accomplished, for example, by standard hybridization or PCR techniques. Techniques for the generation of oligonucleotide mixtures and the screening are well-known (see, e.g., “Current Protocols in Molecular Biology”, supra, and “PCR Protocols: A Guide to Methods and Applications” (Innis et al., eds., Academic Press, Inc., New York, N.Y., 1990)).

[0152] Additionally, methods may be employed that result in the simultaneous identification of genes that encode transmembrane or intracellular proteins that interact with a membrane protein of the present invention. These methods include, for example, probing expression libraries, in a manner similar to the well-known technique of antibody probing of λgt11 libraries, using a labeled membrane protein, polypeptide, peptide, or fusion protein, e.g., a membrane protein polypeptide or domain fused to a marker (e.g., an enzyme, fluor, luminescent protein, or dye), or an Ig-Fc domain.

[0153] One method that detects protein interactions in vivo, the two-hybrid system, is described in detail for illustration only, and not by way of limitation. One version of this system utilizes yeast cells (Chien et al., Proc. Natl. Acad. Sci. USA 88:9578-9582, 1991), while another uses mammalian cells (Luo et al., Biotechniques 22:350-352, 1997). Both the yeast and mammalian two-hybrid systems are commercially available from Clontech (Palo Alto, Calif.), and are further described in U.S. Pat. Nos. 5,283,173; 5,468,614, and 5,667,973.

[0154] Briefly, utilizing such a system, plasmids are constructed that encode two hybrid proteins: one plasmid consists of nucleotides encoding the DNA-binding domain of a transcription activator protein fused to a membrane protein nucleotide sequence encoding a membrane protein, polypeptide, peptide, or fusion protein, and the other plasmid consists of nucleotides encoding an activation domain of a transcription activator protein fused to a cDNA encoding an unknown protein to be tested for interaction with a membrane protein, which has been recombined into this plasmid as part of a cDNA library. The DNA-binding domain fusion plasmid and the cDNA library are transformed into a strain of the yeast Saccharomyces cerevisiae or a mammalian cell (such as Saos-2, CHO, CV1, Jurkat or HeLa) that contains a reporter gene (e.g., HBS, lacZ, CAT, or a gene encoding an essential amino acid) whose regulatory region contains the binding site of the transcription activator. Either hybrid protein alone cannot activate transcription of the reporter gene: the DNA-binding domain hybrid cannot because it does not provide activation function; and the activation domain hybrid cannot because it cannot localize to the binding site of the activator. Interaction of the two hybrid proteins reconstitutes the functional activator protein and results in expression of the reporter gene, which is detected by an assay for the reporter gene product.

[0155] The two-hybrid system, or related methodologies, may be used to screen activation domain libraries for proteins that interact with the “bait” gene product. By way of example, and not by way of limitation, a membrane protein of the present invention may be used as the bait gene product. Total genomic or CDNA sequences are fused to DNA encoding an activation domain. This library and a plasmid encoding a hybrid of a bait membrane protein moiety fused to the DNA-binding domain are co-transformed into a reporter strain, and the resulting transformants are screened for those that express the reporter gene. For example, and not by way of limitation, a bait membrane protein gene sequence, such as an open reading frame of a membrane protein (or a domain of a membrane protein), can be cloned into a vector such that it is translationally fused to DNA encoding the DNA-binding domain of the GAL4 protein. These colonies are purified and the library plasmids responsible for reporter gene expression are isolated. DNA sequencing is then used to identify the proteins encoded by the library plasmids.

[0156] A cDNA library of the cell line from which proteins that interact with bait membrane protein moiety are to be detected can be made using methods routinely practiced in the art. According to one particular system, for example, the cDNA fragments can be inserted into a vector such that they are translationally fused to the transcriptional activation domain of GAL4. This library can be co-transformed along with the bait membrane protein gene-GAL4 fusion plasmid into a yeast strain that: a) cannot grow without added histidine; and b) contains a HIS3 gene driven by a promoter that contains GAL4 activation sequence. A cDNA encoded protein, fused to a GAL4 transcriptional activation domain, which interacts with bait membrane protein moiety will reconstitute an active GAL4 protein, and thereby drive expression of the HIS3 gene. Colonies that express HIS3 can be detected by growth on petri dishes containing semi-solid agar based media lacking histidine. The cDNA can then be purified from these strains, and used to produce and isolate the bait membrane protein moiety-interacting protein using techniques routinely practiced in the art.

### 7.5.3 Assays for Compounds That Interfere With Membrane Protein/Intracellular or Transmembrane Macromolecule Interaction

[0157] Macromolecules that interact with a membrane protein of the present invention are referred to, for purposes of this discussion, as “binding partners”. These binding partners are likely to be involved in a membrane protein signal transduction pathway. Therefore, it is desirable to identify compounds that interfere with or disrupt the interaction of such binding partners with membrane proteins, which may be useful in regulating the activity of a membrane protein and controlling disorders associated with membrane protein activity. Based on the similarity data and expression patterns of the disclosed membrane proteins, they are contemplated to be particularly useful in methods for identifying compounds useful in the therapeutic treatment of, for example, high or low blood pressure, kidney disorders, weight control disorders (or as taste maskers), alcoholism, metabolic disorders, cancer, mood and/or motivation disorders, particularly those involving light cycles, such as seasonal affected disorder, and sleep disorders including, but not limited to, “jet lag”, eating or behavioral disorders, mental illness, paralysis or palsy, nerve damage or degeneration, vision disorders, pain, fever, inflammatory disorders, sepsis, pancreatitis, sexual disorders, such as erectile dysfunction, infertility, and impotence, disorders of the immune system and autoimmune diseases such as diabetes, arthritis, inflammatory bowel disorder, irritable bowel syndrome, Crohn's disease, and ulcerative colitis, osteoporosis, connective tissue disorders, atherosclerosis, heart disease, heart rate disorders, and any associated symptoms.

[0158] The basic principle of the assay systems used to identify compounds that interfere with the interaction between a membrane protein and its binding partner or partners involves preparing a reaction mixture containing a membrane protein, polypeptide, peptide, or fusion protein, as described in Sections 7.5.1 and 7.5.2, and the binding partner under conditions and for a time sufficient to allow the two components to interact and bind, thus forming a complex. In order to test a compound for inhibitory activity, the reaction mixture is prepared in the presence and absence of the test compound. The test compound may be initially included in the reaction mixture, or may be added at a time subsequent to the addition of the membrane protein moiety and its binding partner. Control reaction mixtures are incubated without the test compound or with a placebo. The formation of any complexes between the membrane protein moiety and the binding partner is then detected. The formation of a complex in the control reaction, but not in the reaction mixture containing the test compound, indicates that the compound interferes with the interaction of the membrane protein and the interactive binding partner. Additionally, complex formation within reaction mixtures containing the test compound and a normal membrane protein may also be compared to complex formation within reaction mixtures containing the test compound and a mutant membrane protein. This comparison may be important in those cases wherein it is desirable to identify compounds that specifically disrupt interactions of mutant, or mutated, membrane proteins, but not normal membrane proteins.

[0159] The assay for compounds that interfere with the interaction of a membrane protein and its binding partner(s) can be conducted in a heterogeneous or homogeneous format. Heterogeneous assays involve anchoring either the membrane protein moiety or the binding partner onto a solid phase and detecting complexes anchored on the solid phase at the end of the reaction. In homogeneous assays, the entire reaction is carried out in a liquid phase. In either approach, the order of addition of reactants can be varied to obtain different information about the compounds being tested. For example, test compounds that interfere with the interaction by competition can be identified by conducting the reaction in the presence of the test substance, i.e., by adding the test substance to the reaction mixture prior to, or simultaneously with, a membrane protein moiety and interactive binding partner. Alternatively, test compounds that disrupt preformed complexes, e.g., compounds with higher binding constants that displace one of the components from the complex, can be tested by adding the test compound to the reaction mixture after complexes have been formed. The various formats are described briefly below.

[0160] In a heterogeneous assay system, either a membrane protein moiety or an interactive binding partner is anchored onto a solid surface, while the non-anchored species is labeled, either directly or indirectly. In practice, microtiter plates are conveniently utilized. The anchored species may be immobilized by non-covalent or covalent attachments. Non-covalent attachment may be accomplished simply by coating the solid surface with a solution of a membrane protein moiety or binding partner and drying. Alternatively, an immobilized antibody specific for the species to be anchored may be used to anchor the species to the solid surface. The surfaces may be prepared in advance and stored.

[0161] In order to conduct the assay, the partner of the immobilized species is exposed to the coated surface with or without the test compound. After the reaction is complete, unreacted components are removed (e.g., by washing) and any complexes formed will remain immobilized on the solid surface. The detection of complexes anchored on the solid surface can be accomplished in a number of ways. Where the non-immobilized species is pre-labeled, the detection of label immobilized on the surface indicates that complexes were formed. Where the non-immobilized species is not pre-labeled, an indirect label can be used to detect complexes anchored on the surface, e.g., using a labeled antibody specific for the initially non-immobilized species (the antibody, in turn, may be directly labeled or indirectly labeled with a labeled anti-Ig antibody). Depending upon the order of addition of reaction components, test compounds that inhibit complex formation or that disrupt preformed complexes can be detected.

[0162] Alternatively, the reaction can be conducted in a liquid phase in the presence or absence of the test compound, the reaction products separated from unreacted components, and complexes detected, e.g., using an immobilized antibody specific for one of the binding components to anchor any complexes formed in solution, and a labeled antibody specific for the other partner to detect anchored complexes. Again, depending upon the order of addition of reactants to the liquid phase, test compounds that inhibit complex or that disrupt preformed complexes can be identified.

[0163] In an alternate embodiment of the invention, a homogeneous assay can be used. In this approach, a preformed complex of a membrane protein moiety and an interactive binding partner is prepared in which either the membrane protein moiety or its binding partner is labeled, but the signal generated by the label is quenched due to formation of the complex (see, e.g., U.S. Pat. No. 4,109,496, which utilizes this approach for immunoassays). The addition of a test substance that competes with and displaces one of the species from the preformed complex will result in the generation of a signal above background. In this way, test substances that disrupt interactions between membrane proteins and intracellular binding partners can be identified.

[0164] In a particular embodiment, a membrane protein fusion protein can be prepared for immobilization. For example, a membrane protein (or peptide fragment, e.g., corresponding to a CD) can be fused to a glutathione-S-transferase (GST) gene using a fusion vector, such as pGEX-5X-1, in such a manner that its binding activity is maintained in the resulting fusion protein. The interactive binding partner can be purified and used to raise a monoclonal antibody, using methods routinely practiced in the art and described in Section 7.3. This antibody can be labeled with a radioactive isotope, ¹²⁵I for example, by methods routinely practiced in the art. In a heterogeneous assay, e.g., the GST-membrane protein fusion protein can be anchored to glutathione-agarose beads. The interactive binding partner can then be added in the presence or absence of the test compound in a manner that allows interaction and binding to occur. At the end of the reaction period, unbound material can be washed away, and the labeled monoclonal antibody can be added to the system and allowed to bind to the complexed components. The interaction between a membrane protein moiety and the interactive binding partner can be detected by measuring the amount of radioactivity that remains associated with the glutathione-agarose beads. A successful inhibition of the interaction by the test compound will result in a decrease in measured radioactivity.

[0165] Alternatively, the GST-membrane protein fusion protein and the interactive binding partner can be mixed together in liquid in the absence of the solid glutathione-agarose beads. The test compound can be added either during or after the species are allowed to interact. This mixture can then be added to the glutathione-agarose beads, and unbound material is washed away. Again the extent of inhibition of the interaction between the membrane protein moiety and the binding partner can be detected by adding a labeled antibody, and measuring the radioactivity associated with the beads.

[0166] In another embodiment of the invention, these same techniques can be employed using peptide fragments that correspond to the binding domains of a membrane protein and/or the interactive or binding partner (in cases where the binding partner is a protein), in place of one or both of the full length proteins. Any number of methods routinely practiced in the art can be used to identify and isolate the binding sites. These methods include, but are not limited to, mutagenesis of the gene encoding one of the proteins and screening for disruption of binding in a co-immunoprecipitation assay. Compensatory mutation(s) in the sequence encoding the second species in the complex can then be selected. Sequence analysis of the genes encoding the respective proteins will reveal the mutations that correspond to the region of the protein involved in interactive binding. Alternatively, one protein can be anchored to a solid surface, using methods described herein, and allowed to interact with and bind to its labeled binding partner, which has been treated with a proteolytic enzyme, such as trypsin. After washing, a relatively short, labeled peptide comprising the binding domain may remain associated with the solid material, which can be isolated and identified by amino acid sequencing. Also, once the gene coding for the intracellular binding partner is obtained, short gene segments can be engineered to express peptide fragments of the protein, which can then be tested for binding activity, and purified or synthesized.

[0167] For example, and not by way of limitation, a membrane protein moiety can be anchored to a solid material, as described herein, by making a GST-membrane protein fusion protein and allowing it to bind to glutathione-agarose beads. The interactive binding partner can be labeled with a radioactive isotope, such as ³⁵S, and cleaved with a proteolytic enzyme, such as trypsin. Cleavage products can then be added to the anchored GST-membrane protein fusion protein and allowed to bind. After washing away unbound peptides, labeled bound material, representing the intracellular binding partner binding domain, can be eluted, purified, and analyzed for amino acid sequence by well-known methods. Peptides so identified can be produced synthetically or fused to appropriate facilitative proteins using recombinant DNA technology.

### 7.6 PHARMACEUTICAL COMPOSITIONS

[0168] Compounds identified via assays such as those described herein may be useful, for example, in elaborating the biological functions of the described membrane proteins. Such compounds can be administered to a patient at therapeutically effective doses to treat any of a variety of physiological or mental disorders. A therapeutically effective dose refers to that amount of the compound sufficient to result in any delay in onset, or any amelioration, impediment, prevention, or alteration of any biological or overt symptom.

### 7.6.1 Effective Dose

[0169] Toxicity and therapeutic efficacy of such compounds can be determined by standard pharmaceutical procedures in cell cultures or experimental animals, e.g., for determining the LD₅₀ (the dose lethal to 50% of the population) and the ED₅₀ (the dose therapeutically effective in 50% of the population). The dose ratio between toxic and therapeutic effects is the therapeutic index, and can be expressed as the ratio LD₅₀/ED₅₀. Compounds that exhibit large therapeutic indices are preferred. While compounds that exhibit toxic side effects may be used in certain embodiments, care should be taken to design a delivery system that targets such compounds to the site of affected tissue, in order to minimize potential damage to uninfected cells and, thereby, reduce side effects.

[0170] The data obtained from the cell culture assays and animal studies can be used in formulating a range of dosages for use in humans. The dosage of such compounds lies preferably within a range of circulating concentrations that include the ED₅₀ with little or no toxicity. The dosage may vary within this range depending upon the dosage form employed and the route of administration utilized. For any compound used in the methods of the invention, the therapeutically effective dose can be estimated initially from cell culture assays. A dose may be formulated in animal models to achieve a circulating plasma concentration range that includes the IC₅₀ (i.e., the concentration of the test compound that achieves a half-maximal inhibition of symptoms) as determined in cell culture. Such information can be used to more accurately determine useful doses in humans. Levels in plasma may be measured, for example, by high performance liquid chromatography.

[0171] When the therapeutic treatment of disease is contemplated, the appropriate dosage may also be determined using animal studies to determine the maximal tolerable dose, or MTD, of a bioactive agent per kilogram weight of the test subject. In general, at least one animal species tested is mammalian. Those skilled in the art regularly extrapolate doses for efficacy and avoiding toxicity to other species, including humans. Before human studies of efficacy are undertaken, Phase I clinical studies in normal subjects help establish safe doses.

[0172] Additionally, the bioactive agent may be complexed with a variety of well established compounds or structures that, for instance, enhance the stability of the bioactive agent or otherwise enhance its pharmacological properties (e.g., increase in vivo half-life, reduce toxicity, etc.).

[0173] The therapeutic agents will be administered by any number of methods known to those of ordinary skill in the art including, but not limited to, inhalation, subcutaneous, intravenous, intraperitoneal, intramuscular, or intrathecal injection, or topically applied (transderm, ointments, creams, salves, eye drops, and the like).

### 7.6.2 Formulation and Use

[0174] Pharmaceutical compositions for use in accordance with the present invention may be formulated in a conventional manner using one or more physiologically acceptable carriers or excipients. Thus, the compounds and their physiologically acceptable salts and solvates may be formulated for administration by inhalation or insufflation (either through the mouth or the nose) or oral, buccal, parenteral, intracranial, topical, intrathecal, or rectal administration.

[0175] For oral administration, the pharmaceutical compositions may take the form of, for example, tablets or capsules prepared by conventional means with pharmaceutically acceptable excipients such as binding agents (e.g., pregelatinised maize starch, polyvinylpyrrolidone or hydroxypropyl methylcellulose); fillers (e.g., lactose, microcrystalline cellulose or calcium hydrogen phosphate); lubricants (e.g., magnesium stearate, talc or silica); disintegrants (e.g., potato starch or sodium starch glycolate); or wetting agents (e.g., sodium lauryl sulphate). The tablets may be coated by methods well-known in the art. Liquid preparations for oral administration may take the form of, for example, solutions, syrups or suspensions, or they may be presented as a dry product for constitution with water or other suitable vehicle before use. Such liquid preparations may be prepared by conventional means with pharmaceutically acceptable additives such as suspending agents (e.g., sorbitol syrup, cellulose derivatives or hydrogenated edible fats); emulsifying agents (e.g., lecithin or acacia); non-aqueous vehicles (e.g., almond oil, oily esters, ethyl alcohol or fractionated vegetable oils); and preservatives (e.g., methyl or propyl-p-hydroxybenzoates or sorbic acid). The preparations may also contain buffer salts, flavoring, coloring and sweetening agents as appropriate.

[0176] Preparations for oral administration may be suitably formulated to give controlled release of the active compound. For buccal administration the compositions may take the form of tablets or lozenges formulated in conventional manner.

[0177] For administration by inhalation, the compounds for use according to the present invention are conveniently delivered in the form of an aerosol spray presentation from pressurized packs or a nebulizer, with the use of a suitable propellant, e.g., dichlorodifluoromethane, trichlorofluoromethane, dichlorotetrafluoroethane, carbon dioxide or other suitable gas. In the case of a pressurized aerosol the dosage unit may be determined by providing a valve to deliver a metered amount. Capsules and cartridges of, e.g., gelatin for use in an inhaler or insufflator may be formulated containing a powder mix of the compound and a suitable powder base such as lactose or starch.

[0178] The compounds may be formulated for parenteral administration by injection, e.g., by bolus injection, or continuous infusion. Formulations for injection may be presented in unit dosage form, e.g., in ampoules or in multi-dose containers, with an added preservative. The compositions may take such forms as suspensions, solutions or emulsions in oily or aqueous vehicles, and may contain formulatory agents such as suspending, stabilizing and/or dispersing agents. Alternatively, the active ingredient may be in powder form for constitution with a suitable vehicle, e.g., sterile pyrogen-free water, before use.

[0179] The compounds may also be formulated in rectal compositions such as suppositories or retention enemas, e.g., containing conventional suppository bases such as cocoa butter or other glycerides.

[0180] In addition to the formulations described previously, the compounds may also be formulated as a depot preparation. Such long acting formulations may be administered by implantation (for example subcutaneously or intramuscularly) or by intramuscular injection. Thus, for example, the compounds may be formulated with suitable polymeric or hydrophobic materials (for example as an emulsion in an acceptable oil) or ion exchange resins, or as sparingly soluble derivatives, for example, as a sparingly soluble salt.

[0181] The compositions may, if desired, be presented in a pack or dispenser device that may contain one or more unit dosage forms containing the active ingredient. The pack may, for example, comprise metal or plastic foil, such as a blister pack. The pack or dispenser device may be accompanied by instructions for administration.

[0182] The present invention is not to be limited in scope by the specific embodiments described herein, which are intended as single illustrations of individual aspects of the invention, and functionally equivalent methods and components are within the scope of the invention. Indeed, various modifications of the invention, in addition to those shown and described herein, will become apparent to those skilled in the art from the foregoing description. Such modifications are intended to fall within the scope of the appended claims. All referenced publications, patents, and patent applications are herein incorporated by reference.

1. An isolated nucleic acid molecule that encodes the amino acid sequence of SEQ ID NO:2, 4, 6, 8, 10, 12, 14, 16, 18, 20, 22, 24, 26, 28, 30, 32, 34, 36, 38, 40, 42, 44, 46, 48, 50, 52, 54, 56, 58, 60, 63, 65, 67, 69, 71, 73, 75, 77, 79, 81, 83, 85, 87, 89, 91, 93, 95, 97, 99, 101, 103, 105, 107, 109, 111, 113, 116, 119, 121, 124, 126, 128, 130, 133, 135, 137, 139, 142, 144, 146, 149, 151, 154, 157, 159, 162, 164, 166, 169, 172, 175, 177,180,182, 184, 186, 188, 191, 193, 196, 198, 201, 203, 206, 208, 210, 212, 214, 216, 218, 220, 223, 225, 227, 229, 233, 235, 237, 239, 241, 243, 245, 247, 249, 252, 254, or 257.

2. The isolated nucleic acid molecule of claim 1, wherein said nucleic acid molecule comprises the nucleotide sequence of SEQ ID NO:1, 3, 5, 7, 9, 11, 13, 15, 17, 19, 21, 23, 25, 27, 29, 31, 33, 35, 37, 39, 41, 43, 45, 47, 49, 51, 53, 55, 57, 59, 62, 64, 66, 68, 70, 72, 74, 76, 78, 80, 82, 84, 86, 88, 90, 92, 94, 96, 98, 100, 102, 104, 106, 108, 110, 112, 115, 118, 120, 123, 125, 127, 129, 132, 134, 136, 138, 141, 143, 145, 148, 150, 153, 156, 158, 161, 163, 165, 168, 171, 174, 176, 179, 181, 183, 185, 187, 190, 192, 195, 197, 200, 202, 205, 207, 209, 211, 213, 215, 217, 219, 222, 224, 226, 228, 232, 234, 236, 238, 240, 242, 244, 246, 248, 251, 253, or 256.

3. An expression vector comprising the isolated nucleic acid molecule of claim 1.

4. (canceled)

5. An isolated polypeptide comprising the amino acid sequence of SEQ ID NO:2, 4, 6, 8, 10, 12, 14, 16, 18,20, 22, 24, 26, 28, 30, 32, 34, 36, 38, 40, 42 44, 46, 48, 50, 52, 54, 56, 58, 60, 63, 65, 67, 69, 71, 73, 75, 77, 79, 81, 83, 85, 87, 89, 91, 93, 95, 97, 99, 101,103, 105, 107, 109,111, 113,116, 119, 121, 124, 126, 128, 130, 133, 135, 137, 139, 142, 144, 146, 149, 151, 154, 157, 159, 162, 164, 166, 169, 172, 175, 177, 180, 182, 184, 186, 188, 191, 193, 196, 198, 201, 203, 206, 208, 210, 212, 214, 216, 218, 220, 223, 225, 227, 229, 233, 235, 237, 239, 241, 243, 245, 247, 249, 252, 254, or 257.

6. The isolated polypeptide of claim 5, comprising the amino acid sequence of SEQ ID NO: 2, 4, 6, 8, 10, 12, 14, 16, 18, 20, 22, 24, 26, 28, 30, 32, 34, 36, 38, 40, 42, 44, 46, 48, 50, 52, 54,56, 58, 60, 119, 121, 146, 149, 151, 157, 159, 196, 198, 201, 203, 223, 225, 227, 229, 233, 235, 237, 239, 241, 243, 245, 247, 249, 252, 254, or 257.

7. The isolated nucleic acid molecule of claim 1, wherein said nucleic acid molecule encodes the amino acid sequence of SEQ ID NO: 2, 4, 6, 8, 10, 12, 14, 16, 18, 20, 22, 24, 6, 8, 30 , 32, 34, 36, 38, 40, 42, 44, 46, 48, 50, 52, 54, 56, 58, 60, 119, 121, 146, 149, 151, 157, 159, 196, 198, 201, 203, 223, 225, 227, 229, 233, 235, 237, 239, 241, 243, 245, 247, 249, 252, 254, or 257.

8. The isolated nucleic acid molecule of claim 1, wherein said nucleic acid molecule comprises the nucleotide sequence of SEQ ID NO: 1, 3, 5, 7, 9, 11, 13, 15, 17, 19, 21, 23, 25, 27, 29, 31, 33, 35, 37, 39, 41, 43, 45, 47, 49, 51, 53, 55, 57, 59, 118, 120, 145, 148, 150, 156, 158, 195, 197, 222, 224, 226, 228, 232, 234, 236, 238, 240, 242, 244, 246, 248, 251, 253, or 256.

9. An oligonucleotide that inhibits the expression of a nucleic acid molecule that encodes an amino acid sequence of SEQ ID NO: 2, 4, 6, 8, 10, 12, 14, 16, 18, 20, 22, 24, 26, 28, 30, 32, 34, 36, 38, 40, 42, 44, 46, 48, 50, 52, 54, 56, 58, 60, 63, 65, 67, 69, 71, 73, 75, 77, 79, 81, 83, 85, 87, 89, 91, 93, 95, 97, 99, 101, 103, 105, 107, 109, 111, 113, 116, 119, 121, 124, 126, 128, 130, 133, 135, 137, 139, 142, 144, 146, 149, 151, 154, 157, 159, 162, 164, 166, 169, 172, 175, 177, 180, 182, 184, 186, 188, 191, 193, 196, 198, 201, 203, 206, 208, 210, 212, 214, 216, 218, 220, 223, 225, 227, 229, 233, 235, 237, 239, 241, 243, 245, 247, 249, 252, 254, or 257.

10. The oligonucleotide ofclaim 9, wherein said nucleic acid molecule encodes the amino acid sequence of SEQ ID NO: 2, 4, 6, 8, 10, 12, 14, 16, 18, 20, 22, 24, 26, 28, 30, 32, 34, 36, 38, 40, 42, 44, 46, 48, 50, 52, 54, 56, 58, 60, 119, 121, 146, 149, 151, 157, 159, 196, 198, 201, 203, 223, 225, 227, 229, 233, 235, 237, 239, 241, 243, 245, 247, 249, 252, 254, or 257.

11. An antibody that selectively binds a polypeptide comprising an amino acid sequence of SEQ ID NO: 2, 4, 6, 8, 10, 12, 14, 16, 18, 20, 22, 24, 26, 28, 30, 32, 34, 36, 38, 40, 42, 44, 46, 48, 50, 52, 54, 56, 58, 60, 63, 65, 67, 69, 71, 73, 75, 77, 79, 81, 83, 85, 87, 89, 91, 93, 95, 97, 99, 101, 103, 105, 107, 109, 111, 113, 116, 119, 121, 124, 126, 128, 130, 133, 135, 137, 139, 142, 144, 146, 149, 151, 154, 157, 159, 162, 164, 166, 169, 172, 175, 177, 180, 182, 184, 186, 188, 191, 193, 196, 198, 201, 203, 206, 208, 210, 212, 214, 216, 218, 220, 223, 225, 227, 229, 233, 235, 237, 239, 241, 243, 245, 247, 249, 252, 254, or 257.

12. The anitbody claim 11, wherein said polypeptide comprises the amino acid sequence of SEQ ID NO: 2, 4, 6, 8, 10, 12, 14, 16, 18, 20, 22, 24, 26, 28, 30, 32, 34, 36, 38, 40, 42, 44, 46, 48, 50, 52, 54, 56, 58, 60, 119, 121, 146, 149, 151, 157, 159, 196, 198, 201, 203, 223, 225, 227, 229, 233, 235, 237, 239, 241, 243, 245, 247, 249, 252, 254, or 257.

The application's sequence listing, which the Patent Office published only in electronic form, follows.

SEQUENCE LISTING (257 sequences)

SEQ ID NO: 1 - DNA, 1116 bp, Homo sapiens
  CDS (1)...(1116)
atgccagccaacttcacagagggcagcttcgattccagtgggaccgggcagacgctggattcttccccagtggcttgcactgaaacagtgacttttactgaagtggtggaaggaaaggaatggggttccttctactactcctttaagactgagcaattgataactctgtgggtcctctttgtttttaccattgttggaaactccgttgtgcttttttccacatggaggagaaagaagaagtcaagaatgaccttctttgtgactcagctggccatcacagattctttcacaggactggtcaacatcttgacagatattaattggcgattcactggagacttcacggcacctgacctggtttgccgagtggtccgctatttgcaggttgtgctgctctacgcctctacctacgtcctggtgtccctcagcatagacagataccatgccatcgtctaccccatgaagttccttcaaggagaaaagcaagccagggtcctcattgtgatcgcctggagcctgtcttttctgttctccattcccaccctgatcatatttgggaagaggacactgtccaacggtgaagtgcagtgctgggccctgtggcctgacgactcctactggaccccatacatgaccatcgtggccttcctggtgtacttcatccctctgacaatcatcagcatcatgtatggcattgtgatccgaactatttggattaaaagcaaaacctacgaaacagtgatttccaactgctcagatgggaaactgtgcagcagctataaccgaggactcatctcaaaggcaaaaatcaaggctrtcaagtatagcatcatcatcattcttgccttcatctgctgttggagtccatacttcctgtttgacattttggacaatttcaacctccttccagacacccaggagcrtttctatgcctctgtgatcattcagaacctgccagcattgaatagtgccatcaaccccctcatctactgtgtcttcagcagctccatctctttcccctgcagggagcgaagatcacaggattccagaatgacgttccgggagagaaccgagaggcatgagatgcagattctgtccaagccagaattcatctag

SEQ ID NO: 2 - protein, 371 aa, Homo sapiens
  VARIANT (1)...(371): Xaa = Any Amino Acid
MPANFTEGSFDSSGTGQTLDSSPVACTETVTFTEVVEGKEWGSFYYSFKTEQLITLWVLFVFTIVGNSVVLFSTWRRKKKSRMTFFVTQLAITDSFTGLVNILTDINWRFTGDFTAPDLVCRVVRYLQVVLLYASTYVLVSLSIDRYHAIVYPMKFLQGEKQARVLIVIAWSLSFLFSIPTLIIFGKRTLSNGEVQCWALWPDDSYWTPYMTIVAFLVYFIPLTIISIMYGIVIRTIWIKSKTYETVISNCSDGKLCSSYNRGLISKAKIKAXKYSIIIILAFICCWSPYFLFDILDNFNLLPDTQEXFYASVIIQNLPALNSAINPLIYCVFSSSISFPCRERRSQDSRMTFRERTERHEMQILSKPEFI

SEQ ID NO: 3 - DNA, 3753 bp, Homo sapiens
  CDS (1)...(3753)
atgtttcgctcagatcgaatgtggagctgccattggaaatggaagcccagtcctctcctgttcttatttgctttatatatcatgtgtgttcctcactcagcagtgtggggatgtgccaactgccgagtggttttgtccaacccttctgggacctttacttctccatgctaccctaacgactacccaaacagccaggcttgcatgtggacgctccgagcccccaccggttatatcattcagataacatttaacgactttgacattgaagaagctcccaattgcatttatgactcattatcccttgataatggagagagccagactaaattttgtggagcaactgccaaaggcctatcatttaactcaagtgcgaatgagatgcatgtgtccttttcaagtgactttagcatccagaagaaaggtttcaatgccagctacatcagagttgccgtgtccttaaggaatcaaaaggtcattttaccccagacatcagatgcttaccaggtatctgttgcaaaaagcatctctattccagagctcagtgctttcacactctgctttgaagcaaccaaagttggccatgaagacagtgattggacagctttctcctactcaaatgcatccttcacacaattgctcagttttggaaaggccaagagtggctactttctatccatttctgattcaaaatgtttgttgaataatgcattacctgtcaaagaaaaagaagacatttttgcagaaagctttgaacagctctgccttgtttggaataattctttgggctctattggtgtaaatttcaaaagaaactatgaaacagttccatgtgattctaccattagtaaagttattcctgggaatgggaaattgttgttgggctccaatcaaaatgaaattgtctctctaaaaggggacatttataactttcgactttggaattttaccatgaatgccaaaatcctctccaacctcagctgtaatgtgaaagggaatgtagtcgactggcaaaatgacttctggaatatcccaaacctagctctgaaagctgaaagcaacctaagctgtggttcctacctgatcccgctcccagcagcagaactggccagctgtgcagacctggggaccctctgtcaagctactgtaaactctcctagtactacaccacccactgtcaccactaacatgcctgttactaacagaatcgataaacaaaggaatgatggaattatctatagaatatccgtagtgattcagaacatccttcgtcaccctgaggtaaaagtacagagcaaggtggcagaatggctcaattcaaccttccaaaattggaactacacggtttatgtcgttaatatcagttttcacctgagtgctggagaggacaagattaaagtcaagagaagccttgaggatgagccaaggttggtgctttgggcccttctagtttacaatgctaccaacaatactaatttagaaggaaaaatcattcagcagaagctcctaaaaaataatgagtccttggatgaaggcttgaggctacatacagtgaatgtgagacaactgggtcattgtcttgccatggaggaacccaaaggctactactggccatctatccaaccttctgaatacgttcttccttgtccagacaagcctggcttttctgcttctcggatatgtttttacaatgctaccaacccattggtaacctactggggacctgttgatatctccaactgtttaaaagaagcaaatgaagttgctaaccagattttaaatttaactgctgatgggcagaacttaacctcagccaatattaccaacattgtggaacaggtcaaaagaattgtgaataaagaagaaaacattgatataacacttggctcaactctaatgaatatattttctaatatcttaagcagttcagacagtgacttgcttgagtcatcttctgaagctttaaaaacaattgatgaattggccttcaagatagacctaaatagcacatcacatgtgaatattacaactcggaacttggctctcagcgtatcatccctgttaccagggacaaatgcaatttcaaattttagcattggtcttccaagcaataatgaatcgtatttccagatggattttgagagtggacaagtggatccactggcatctgtaattttgcctccaaacttacttgagaatttaagtccagaagattctgtattagttagaagagcacagtttactttcttcaacaaaactggacttttccaggatgtaggaccccaaagaaaaactttagtgagttatgtgatggcgtgcagtattggaaacattactatccagaatctgaaggatcctgttcaaataaaaatcaaacatacaagaactcaggaagtgcatcatcccatctgtgccttctgggatctgaacaaaaacaaaagttttggaggatggaacacgtcaggatgtgttgcacacagagattcagatgcaagtgagacagtctgcctgtgtaaccacttcacacactttggagttctgatggaccttccaagaagtgcctcacagttagatgcaagaaacactaaagtcctcactttcatcagctatattgggtgtggaatatctgctattttttcagcagcaactctcctgacatatgttgcttttgagaaattgcgaagggattatccctccaaaatcttgatgaacctgagcacagccctgctgttcctgaatctcctcttcctcctagatggctggatcacctccttcaatgtggatggactttgcattgctgttgcagtcctgttgcatttcttccttctggcaacctttacctggatggggctagaagcaattcacatgtacattgctctagttaaagtatttaacacttacattcgccgatacattctaaaattctgcatcattggctggggtttgcctgccttagtggtgtcagttgttctagcgagcagaaacaacaatgaagtctatggaaaagaaagttatgggaaagaaaaaggtgatgaattctgttggattcaagatccagtcatattttatgtgacctgtgctgggtattttggagtcatgttttttctgaacattgccatgttcattgtggtaatggtgcagatctgtgggaggaatggcaagagaagcaaccggaccctgagagaagaagtgttaaggaacctgcgcagtgtggttagcttgacctttctgttgggcatgacatggggttttgcattctttgcctggggacccttaaatatccccttcatgtacctcttctccatcttcaattcattacaaggcttatttatattcatcttccactgtgctatgaaggagaatgttcagaaacagtggcggcggcatctctgctgtggtagatttcggttagcagataactcagattggagtaagacagctaccaatatcatcaagaaaagttctgataatctaggaaaatctttgtcttcaagctccattggttccaactcaacctatcttacatccaaatctaaatccagctctaccacctatttcaaaaggaatagccacacagacagtgcttccatggacaagtccttgtcaaaactggcccatgctgatggagatcaaacatcaatcatccctgtccatcaggtcattgataaggtcaagggttattgcaatgctcattcagacaacttctataaaaatattatcatgtcagacaccttcagccacagcacaaagttttaa

SEQ ID NO: 4 - protein, 1250 aa, Homo sapiens
MFRSDRMWSCHWKWKPSPLLFLFALYIMCVPHSAVWGCANCRVVLSNPSGTFTSPCYPNDYPNSQACMWTLRAPTGYIIQITFNDFDIEEAPNCIYDSLSLDNGESQTKFCGATAKGLSFNSSANEMHVSFSSDFSIQKKGFNASYIRVAVSLRNQKVILPQTSDAYQVSVAKSISIPELSAFTLCFEATKVGHEDSDWTAFSYSNASFTQLLSFGKAKSGYFLSISDSKCLLNNALPVKEKEDIFAESFEQLCLVWNNSLGSIGVNFKRNYETVPCDSTISKVIPGNGKLLLGSNQNEIVSLKGDIYNFRLWNFTMNAKILSNLSCNVKGNVVDWQNDFWNIPNLALKAESNLSCGSYLIPLPAAELASCADLGTLCQATVNSPSTTPPTVTTNMPVTNRIDKQRNDGIIYRISVVIQNILRHPEVKVQSKVAEWLNSTFQNWNYTVYVVNISFHLSAGEDKIKVKRSLEDEPRLVLWALLVYNATNNTNLEGKIIQQKLLKNNESLDEGLRLHTVNVRQLGHCLAMEEPKGYYWPSIQPSEYVLPCPDKPGFSASRICFYNATNPLVTYWGPVDISNCLKEANEVANQILNLTADGQNLTSANITNIVEQVKRIVNKEENIDITLGSTLMNIFSNILSSSDSDLLESSSEALKTIDELAFKIDLNSTSHVNITTRNLALSVSSLLPGTNAISNFSIGLPSNNESYFQMDFESGQVDPLASVILPPNLLENLSPEDSVLVRRAQFTFFNKTGLFQDVGPQRKTLVSYVMACSIGNITIQNLKDPVQIKIKHTRTQEVHHPICAFWDLNKNKSFGGWNTSGCVAHRDSDASETVCLCNHFTHFGVLMDLPRSASQLDARNTKVLTFISYIGCGISAIFSAATLLTYVAFEKLRRDYPSKILMNLSTALLFLNLLFLLDGWITSFNVDGLCIAVAVLLHFFLLATFTWMGLEAIHMYIALVKVFNTYIRRYILKFCIIGWGLPALVVSVVLASRNNNEVYGKESYGKEKGDEFCWIQDPVIFYVTCAGYFGVMFFLNIAMFIVVMVQICGRNGKRSNRTLREEVLRNLRSVVSLTFLLGMTWGFAFFAWGPLNIPFMYLFSIFNSLQGLFIFIFHCAMKENVQKQWRRHLCCGRFRLADNSDWSKTATNIIKKSSDNLGKSLSSSSIGSNSTYLTSKSKSSSTTYFKRNSHTDSASMDKSLSKLAHADGDQTSIIPVHQVIDKVKGYCNAHSDNFYKNIIMSDTFSHSTKF

SEQ ID NO: 5 - DNA, 3666 bp, Homo sapiens
  CDS (1)...(3666)
atgtttcgctcagatcgaatgtggagctgccattggaaatggaagcccagtcctctcctgttcttatttgctttatatatcatgtgtgttcctcactcagcagtgtggggatgtgccaactgccgagtggttttgtccaacccttctgggacctttacttctccatgctaccctaacgactacccaaacagccaggcttgcatgtggacgctccgagcccccaccggttatatcattcagataacatttaacgactttgacattgaagaagctcccaattgcatttatgactcattatcccttgataatggagagagccagactaaattttgtggagcaactgccaaaggcctatcatttaactcaagtgcgaatgagatgcatgtgtccttttcaagtgactttagcatccagaagaaaggtttcaatgccagctacatcagagttgccgtgtccttaaggaatcaaaaggtcattttaccccagacatcagatgcttaccaggtatctgttgcaaaaagcatctctattccagagctcagtgctttcacactctgctttgaagcaaccaaagttggccatgaagacagtgattggacagctttctcctactcaaatgcatccttcacacaattgctcagttttggaaaggccaagagtggctactttctatccatttctgattcaaaatgtttgttgaataatgcattacctgtcaaagaaaaagaagacatttttgcagaaagctttgaacagctctgccttgtttggaataattctttgggctctattggtgtaaatttcaaaagaaactatgaaacagttccatgtgattctaccattagtaaagttattcctgggaatgggaaattgttgttgggctccaatcaaaatgaaattgtctctctaaaaggggacatttataactttcgactttggaattttaccatgaatgccaaaatcctctccaacctcagctgtaatgtgaaagggaatgtagtcgactggcaaaatgacttctggaatatcccaaacctagctctgaaagctgaaagcaacctaagctgtggttcctacctgatcccgctcccagcagcagaactggccagctgtgcagacctggggaccctctgtcaagctactgtaaactctcctagtactacaccacccactgtcaccactaacatgcctgttactaacagaatcgataaacaaaggaatgatggaattatctatagaatatccgtagtgattcagaacatccttcgtcaccctgaggtaaaagtacagagcaaggtggcagaatggctcaattcaaccttccaaaattggaactacacggtttatgtcgttaatatcagttttcacctgagtgctggagaggacaagattaaagtcaagagaagccttgaggatgagccaaggttggtgctttgggcccttctagtttacaatgctaccaacaatactaatttagaaggaaaaatcattcagcagaagctcctaaaaaataatgagtccttggatgaaggcttgaggctacatacagtgaatgtgagacaactgggtcattgtcttgccatggaggaacccaaaggctactactggccatctatccaaccttctgaatacgttcttccttgtccagacaagcctggcttttctgcttctcggatatgtttttacaatgctaccaacccattggtaacctactggggacctgttgatatctccaactgtttaaaagaagcaaatgaagttgctaaccagattttaaatttaactgctgatgggcagaacttaacctcagccaatattaccaacattgtggaacaggtcaaaagaattgtgaataaagaagaaaacattgatataacacttggctcaactctaatgaatatattttctaatatcttaagcagttcagacagtgacttgcttgagtcatcttctgaagctttaaaaacaattgatgaattggccttcaagatagacctaaatagcacatcacatgtgaatattacaactcggaacttggctctcagcgtatcatccctgttaccagggacaaatgcaatttcaaattttagcattggtcttccaagcaataatgaatcgtatttccagatggattttgagagtggacaagtggatccactggcatctgtaattttgcctccaaacttacttgagaatttaagtccagaagattctgtattagttagaagagcacagtttactttcttcaacaaaactggacttttccaggatgtaggaccccaaagaaaaactttagtgagttatgtgatggcgtgcagtattggaaacattactatccagaatctgaaggatcctgttcaaataaaaatcaaacatacaagaactcaggaagtgcatcatcccatctgtgccttctgggatctgaacaaaaacaaaagttttggaggatggaacacgtcaggatgtgttgcacacagagattcagatgcaagtgagacagtctgcctgtgtaaccacttcacacactttggagttctgatggaccttccaagaagtgcctcacagttagatgcaagaaacactaaagtcctcactttcatcagctatattgggtgtggaatatctgctattttttcagcagcaactctcctgacatatgttgcttttgagaaattgcgaagggattatccctccaaaatcttgatgaacctgagcacagccctgctgttcctgaatctcctcttcctcctagatggctggatcacctccttcaatgtggatggactttgcattgctgttgcagtcctgttgcatttcttccttctggcaacctttacctggatggggctagaagcaattcacatgtacattgctctagttaaagtatttaacacttacattcgccgatacattctaaaattctgcatcattggctggggtttgcctgccttagtggtgtcagttgttctagcgagcagaaacaacaatgaagtctatggaaaagaaagttatgggaaagaaaaaggtgatgaattctgttggattcaagatccagtcatattttatgtgacctgtgctgggtattttggagtcatgttttttctgaacattgccatgttcattgtggtaatggtgcagatctgtgggaggaatggcaagagaagcaaccggaccctgagagaagaagtgttaaggaacctgcgcagtgtggttagcttgacctttctgttgggcatgacatggggttttgcattctttgcctggggacccttaaatatccccttcatgtacctcttctccatcttcaattcattacaaggcttatttatattcatcttccactgtgctatgaaggagaatgttcagaaacagtggcggcggcatctctgctgtggtagatttcggttagcagataactcagattggagtaagacagctaccaatatcatcaagaaaagttctgataatctaggaaaatctttgtcttcaagctccattggttccaactcaacctatcttacatccaaatctaaatccagctctaccacctatttcaaaaggaatagccacacagataatgtctcctatgagcattccttcaacaaaagtggatcactcagacagtgcttccatggacaagtccttgtcaaaactggcccatgctga

SEQ ID NO: 6 - protein, 1221 aa, Homo sapiens
MFRSDRMWSCHWKWKPSPLLFLFALYIMCVPHSAVWGCANCRVVLSNPSGTFTSPCYPNDYPNSQACMWTLRAPTGYIIQITFNDFDIEEAPNCIYDSLSLDNGESQTKFCGATAKGLSFNSSANEMHVSFSSDFSIQKKGFNASYIRVAVSLRNQKVILPQTSDAYQVSVAKSISIPELSAFTLCFEATKVGHEDSDWTAFSYSNASFTQLLSFGKAKSGYFLSISDSKCLLNNALPVKEKEDIFAESFEQLCLVWNNSLGSIGVNFKRNYETVPCDSTISKVIPGNGKLLLGSNQNEIVSLKGDIYNFRLWNFTMNAKILSNLSCNVKGNVVDWQNDFWNIPNLALKAESNLSCGSYLIPLPAAELASCADLGTLCQATVNSPSTTPPTVTTNMPVTNRIDKQRNDGIIYRISVVIQNILRHPEVKVQSKVAEWLNSTFQNWNYTVYVVNISFHLSAGEDKIKVKRSLEDEPRLVLWALLVYNATNNTNLEGKIIQQKLLKNNESLDEGLRLHTVNVRQLGHCLAMEEPKGYYWPSIQPSEYVLPCPDKPGFSASRICFYNATNPLVTYWGPVDISNCLKEANEVANQILNLTADGQNLTSANITNIVEQVKRIVNKEENIDITLGSTLMNIFSNILSSSDSDLLESSSEALKTIDELAFKIDLNSTSHVNITTRNLALSVSSLLPGTNAISNFSIGLPSNNESYFQMDFESGQVDPLASVILPPNLLENLSPEDSVLVRRAQFTFFNKTGLFQDVGPQRKTLVSYVMACSIGNITIQNLKDPVQIKIKHTRTQEVHHPICAFWDLNKNKSFGGWNTSGCVAHRDSDASETVCLCNHFTHFGVLMDLPRSASQLDARNTKVLTFISYIGCGISAIFSAATLLTYVAFEKLRRDYPSKILMNLSTALLFLNLLFLLDGWITSFNVDGLCIAVAVLLHFFLLATFTWMGLEAIHMYIALVKVFNTYIRRYILKFCIIGWGLPALVVSVVLASRNNNEVYGKESYGKEKGDEFCWIQDPVIFYVTCAGYFGVMFFLNIAMFIVVMVQICGRNGKRSNRTLREEVLRNLRSVVSLTFLLGMTWGFAFFAWGPLNIPFMYLFSIFNSLQGLFIFIFHCAMKENVQKQWRRHLCCGRFRLADNSDWSKTATNIIKKSSDNLGKSLSSSSIGSNSTYLTSKSKSSSTTYFKRNSHTDNVSYEHSFNKSGSLRQCFHGQVLVKTGPC

SEQ ID NO: 7 - DNA, 2157 bp, Homo sapiens
  CDS (1)...(2157)
atgtttcgctcagatcgaatgtggagctgccattggaaatggaagcccagtcctctcctgttcttatttgctttatatatcatgtgtgttcctcactcagcagtgtggggatgtgccaactgccgagtggttttgtccaacccttctgggacctttacttctccatgctaccctaacgactacccaaacagccaggcttgcatgtggacgctccgagcccccaccggttatatcattcagataacatttaacgactttgacattgaagaagctcccaattgcatttatgactcattatcccttgataatggagagagccagactaaattttgtggagcaactgccaaaggcctatcatttaactcaagtgcgaatgagatgcatgtgtccttttcaagtgactttagcatccagaagaaaggtttcaatgccagctacatcagagttgccgtgtccttaaggaatcaaaaggtcattttaccccagacatcagatgcttaccaggtatctgttgcaaaaagcatctctattccagagctcagtgctttcacactctgctttgaagcaaccaaagttggccatgaagacagtgattggacagctttctcctactcaaatgcatccttcacacaattgctcagttttggaaaggccaagagtggctactttctatccatttctgattcaaaatgtttgttgaataatgcattacctgtcaaagaaaaagaagacatttttgcagaaagctttgaacagctctgccttgtttggaataattctttgggctctattggtgtaaatttcaaaagaaactatgaaacagttccatgtgattctaccattagtaaagttattcctgggaatgggaaattgttgttgggctccaatcaaaatgaaattgtctctctaaaaggggacatttataactttcgactttggaattttaccatgaatgccaaaatcctctccaacctcagctgtaatgtgaaagggaatgtagtcgactggcaaaatgacttctggaatatcccaaacctagctctgaaagctgaaagcaacctaagctgtggttcctacctgatcccgctcccagcagcagaactggccagctgtgcagacctggggaccctctgtcaagctactgtaaactctcctagtactacaccacccactgtcaccactaacatgcctgttactaacagaatcgataaacaaaggaatgatggaattatctatagaatatccgtagtgattcagaacatccttcgtcaccctgaggtaaaagtacagagcaaggtggcagaatggctcaattcaaccttccaaaattggaactacacggtttatgtcgttaatatcagttttcacctgagtgctggagaggacaagattaaagtcaagagaagccttgaggatgagccaaggttggtgctttgggcccttctagtttacaatgctaccaacaatactaatttagaaggaaaaatcattcagcagaagctcctaaaaaataatgagtccttggatgaaggcttgaggctacatacagtgaatgtgagacaactgggtcattgtcttgccatggaggaacccaaaggctactactggccatctatccaaccttctgaatacgttcttccttgtccagacaagcctggcttttctgcttctcggatatgtttttacaatgctaccaacccattggtaacctactggggacctgttgatatctccaactgtttaaaagaagcaaatgaagttgctaaccagattttaaatttaactgctgatgggcagaacttaacctcagccaatattaccaacattgtggaacaggtcaaaagaattgtgaataaagaagaaaacattgatataacacttggctcaactctaatgaatatattttctaatatcttaagcagttcagacagtgacttgcttgagtcatcttctgaagctttaaaaacaattgatgaattggccttcaagatagacctaaatagcacatcacatgtgaatattacaactcggaacttggctctcagcgtatcatccctgttaccagggacaaatgcaatttcaaattttagcattggtcttccaagcaataatgaatcgtatttccaggtaatgagccagtggtttctttcattttaa

SEQ ID NO: 8 - protein, 718 aa, Homo sapiens
MFRSDRMWSCHWKWKPSPLLFLFALYIMCVPHSAVWGCANCRVVLSNPSGTFTSPCYPNDYPNSQACMWTLRAPTGYIIQITFNDFDIEEAPNCIYDSLSLDNGESQTKFCGATAKGLSFNSSANEMHVSFSSDFSIQKKGFNASYIRVAVSLRNQKVILPQTSDAYQVSVAKSISIPELSAFTLCFEATKVGHEDSDWTAFSYSNASFTQLLSFGKAKSGYFLSISDSKCLLNNALPVKEKEDIFAESFEQLCLVWNNSLGSIGVNFKRNYETVPCDSTISKVIPGNGKLLLGSNQNEIVSLKGDIYNFRLWNFTMNAKILSNLSCNVKGNVVDWQNDFWNIPNLALKAESNLSCGSYLIPLPAAELASCADLGTLCQATVNSPSTTPPTVTTNMPVTNRIDKQRNDGIIYRISVVIQNILRHPEVKVQSKVAEWLNSTFQNWNYTVYVVNISFHLSAGEDKIKVKRSLEDEPRLVLWALLVYNATNNTNLEGKIIQQKLLKNNESLDEGLRLHTVNVRQLGHCLAMEEPKGYYWPSIQPSEYVLPCPDKPGFSASRICFYNATNPLVTYWGPVDISNCLKEANEVANQILNLTADGQNLTSANITNIVEQVKRIVNKEENIDITLGSTLMNIFSNILSSSDSDLLESSSEALKTIDELAFKIDLNSTSHVNITTRNLALSVSSLLPGTNAISNFSIGLPSNNESYFQVMSQWFLSF

SEQ ID NO: 9 - DNA, 3339 bp, Homo sapiens
  CDS (1)...(3339)
atgtttcgctcagatcgaatgtggagctgccattggaaatggaagcccagtcctctcctgttcttatttgctttatatatcatgtgtgttcctcactcagcagtgtggggatgtgccaactgccgagtggttttgtccaacccttctgggacctttacttctccatgctaccctaacgactacccaaacagccaggcttgcatgtggacgctccgagcccccaccggttatatcattcagataacatttaacgactttgacattgaagaagctcccaattgcatttatgactcattatcccttgataatggagagagccagactaaattttgtggagcaactgccaaaggcctatcatttaactcaagtgcgaatgagatgcatgtgtccttttcaagtgactttagcatccagaagaaaggtttcaatgccagctacatcagagttgccgtgtccttaaggaatcaaaaggtcattttaccccagacatcagatgcttaccaggtatctgttgcaaaaagcatctctattccagagctcagtgctttcacactctgctttgaagcaaccaaagttggccatgaagacagtgattggacagctttctcctactcaaatgcatccttcacacaattgctcagttttggaaaggccaagagtggctactttctatccatttctgattcaaaatgtttgttgaataatgcattacctgtcaaagaaaaagaagacatttttgcagaaagctttgaacagctctgccttgtttggaataattctttgggctctattggtgtaaatttcaaaagaaactatgaaacagttccatgtgattctaccattagtaaagttattcctgggaatgggaaattgttgttgggctccaatcaaaatgaaattgtctctctaaaaggggacatttataactttcgactttggaattttaccatgaatgccaaaatcctctccaacctcagctgtaatgtgaaagggaatgtagtcgactggcaaaatgacttctggaatatcccaaacctagctctgaaagctgaaagcaacctaagctgtggttcctacctgatcccgctcccagcagcagaactggccagctgtgcagacctggggaccctctgtcaagctactgtaaactctcctagtactacaccacccactgtcaccactaacatgcctgttactaacagaatcgataaacaaaggaatgatggaattatctatagaatatccgtagtgattcagaacatccttcgtcaccctgaggtaaaagtacagagcaaggtggcagaatggctcaattcaaccttccaaaattggaactacacggtttatgtcgttaatatcagttttcacctgagtgctggagaggacaagattaaagtcaagagaagccttgaggatgagccaaggttggtgctttgggcccttctagtttacaatgctaccaacaatactaatttagaaggaaaaatcattcagcagaagctcctaaaaaataatgagtccttggatgaaggcttgaggctacatacagtgaatgtgagacaactgggtcattgtcttgccatggaggaacccaaaggctactactggccatctatccaaccttctgaatacgttcttccttgtccagacaagcctggcttttctgcttctcggatatgtttttacaatgctaccaacccattggtaacctactggggacctgttgatatctccaactgtttaaaagaagcaaatgaagttgctaaccagattttaaatttaactgctgatgggcagaacttaacctcagccaatattaccaacattgtggaacaggtcaaaagaattgtgaataaagaagaaaacattgatataacacttggctcaactctaatgaatatattttctaatatcttaagcagttcagacagtgacttgcttgagtcatcttctgaagctttaaaaacaattgatgaattggccttcaagatagacctaaatagcacatcacatgtgaatattacaactcggaacttggctctcagcgtatcatccctgttaccagggacaaatgcaatttcaaattttagcattggtcttccaagcaataatgaatcgtatttccagatggattttgagagtggacaagtggatccactggcatctgtaattttgcctccaaacttacttgagaatttaagtccagaagattctgtattagttagaagagcacagtttactttcttcaacaaaactggacttttccaggatgtaggaccccaaagaaaaactttagtgagttatgtgatggcgtgcagtattggaaacattactatccagaatctgaaggatcctgttcaaataaaaatcaaacatacaagaactcaggaagtgcatcatcccatctgtgccttctgggatctgaacaaaaacaaaagttttggaggatggaacacgtcaggatgtgttgcacacagagattcagatgcaagtgagacagtctgcctgtgtaaccacttcacacactttggagttctgatggaccttccaagaagtgcctcacagttagatgcaagaaacactaaagtcctcactttcatcagctatattgggtgtggaatatctgctattttttcagcagcaactctcctgacatatgttgcttttgagaaattgcgaagggattatccctccaaaatcttgatgaacctgagcacagccctgctgttcctgaatctcctcttcctcctagatggctggatcacctccttcaatgtggatggactttgcattgctgttgcagtcctgttgcatttcttccttctggcaacctttacctggatggggctagaagcaattcacatgtacattgctctagttaaagtatttaacacttacattcgccgatacattctaaaattctgcatcattggctggggtttgcctgccttagtggtgtcagttgttctagcgagcagaaacaacaatgaagtctatggaaaagaaagttatgggaaagaaaaaggtgatgaattctgttggattcaagatccagtcatattttatgtgacctgtgctgggtattttggagtcatgttttttctgaacattgccatgttcattgtggtaatggtgcagatctgtgggaggaatggcaagagaagcaaccggaccctgagagaagaagtgttaaggaacctgcgcagtgtggttagcttgacctttctgttgggcatgacatggggttttgcattctttgcctggggacccttaaatatccccttcatgtacctcttctccatcttcaattcattacaaggtaagataaattgtacatga

SEQ ID NO: 10 - protein, 1112 aa, Homo sapiens
MFRSDRMWSCHWKWKPSPLLFLFALYIMCVPHSAVWGCANCRVVLSNPSGTFTSPCYPNDYPNSQACMWTLRAPTGYIIQITFNDFDIEEAPNCIYDSLSLDNGESQTKFCGATAKGLSFNSSANEMHVSFSSDFSIQKKGFNASYIRVAVSLRNQKVILPQTSDAYQVSVAKSISIPELSAFTLCFEATKVGHEDSDWTAFSYSNASFTQLLSFGKAKSGYFLSISDSKCLLNNALPVKEKEDIFAESFEQLCLVWNNSLGSIGVNFKRNYETVPCDSTISKVIPGNGKLLLGSNQNEIVSLKGDIYNFRLWNFTMNAKILSNLSCNVKGNVVDWQNDFWNIPNLALKAESNLSCGSYLIPLPAAELASCADLGTLCQATVNSPSTTPPTVTTNMPVTNRIDKQRNDGIIYRISVVIQNILRHPEVKVQSKVAEWLNSTFQNWNYTVYVVNISFHLSAGEDKIKVKRSLEDEPRLVLWALLVYNATNNTNLEGKIIQQKLLKNNESLDEGLRLHTVNVRQLGHCLAMEEPKGYYWPSIQPSEYVLPCPDKPGFSASRICFYNATNPLVTYWGPVDISNCLKEANEVANQILNLTADGQNLTSANITNIVEQVKRIVNKEENIDITLGSTLMNIFSNILSSSDSDLLESSSEALKTIDELAFKIDLNSTSHVNITTRNLALSVSSLLPGTNAISNFSIGLPSNNESYFQMDFESGQVDPLASVILPPNLLENLSPEDSVLVRRAQFTFFNKTGLFQDVGPQRKTLVSYVMACSIGNITIQNLKDPVQIKIKHTRTQEVHHPICAFWDLNKNKSFGGWNTSGCVAHRDSDASETVCLCNHFTHFGVLMDLPRSASQLDARNTKVLTFISYIGCGISAIFSAATLLTYVAFEKLRRDYPSKILMNLSTALLFLNLLFLLDGWITSFNVDGLCIAVAVLLHFFLLATFTWMGLEAIHMYIALVKVFNTYIRRYILKFCIIGWGLPALVVSVVLASRNNNEVYGKESYGKEKGDEFCWIQDPVIFYVTCAGYFGVMFFLNIAMFIVVMVQICGRNGKRSNRTLREEVLRNLRSVVSLTFLLGMTWGFAFFAWGPLNIPFMYLFSIFNSLQGKINCT

SEQ ID NO: 11 - DNA, 3750 bp, Homo sapiens
  CDS (1)...(3750)
atgtttcgctcagatcgaatgtggagctgccattggaaatggaagcccagtcctctcctgttcttatttgctttatatatcatgtgtgttcctcactcagtgtggggatgtgccaactgccgagtggttttgtccaacccttctgggacctttacttctccatgctaccctaacgactacccaaacagccaggcttgcatgtggacgctccgagcccccaccggttatatcattcagataacatttaacgactttgacattgaagaagctcccaattgcatttatgactcattatcccttgataatggagagagccagactaaattttgtggagcaactgccaaaggcctatcatttaactcaagtgcgaatgagatgcatgtgtccttttcaagtgactttagcatccagaagaaaggtttcaatgccagctacatcagagttgccgtgtccttaaggaatcaaaaggtcattttaccccagacatcagatgcttaccaggtatctgttgcaaaaagcatctctattccagagctcagtgctttcacactctgctttgaagcaaccaaagttggccatgaagacagtgattggacagctttctcctactcaaatgcatccttcacacaattgctcagttttggaaaggccaagagtggctactttctatccatttctgattcaaaatgtttgttgaataatgcattacctgtcaaagaaaaagaagacatttttgcagaaagctttgaacagctctgccttgtttggaataattctttgggctctattggtgtaaatttcaaaagaaactatgaaacagttccatgtgattctaccattagtaaagttattcctgggaatgggaaattgttgttgggctccaatcaaaatgaaattgtctctctaaaaggggacatttataactttcgactttggaattttaccatgaatgccaaaatcctctccaacctcagctgtaatgtgaaagggaatgtagtcgactggcaaaatgacttctggaatatcccaaacctagctctgaaagctgaaagcaacctaagctgtggttcctacctgatcccgctcccagcagcagaactggccagctgtgcagacctggggaccctctgtcaagctactgtaaactctcctagtactacaccacccactgtcaccactaacatgcctgttactaacagaatcgataaacaaaggaatgatggaattatctatagaatatccgtagtgattcagaacatccttcgtcaccctgaggtaaaagtacagagcaaggtggcagaatggctcaattcaaccttccaaaattggaactacacggtttatgtcgttaatatcagttttcacctgagtgctggagaggacaagattaaagtcaagagaagccttgaggatgagccaaggttggtgctttgggcccttctagtttacaatgctaccaacaatactaatttagaaggaaaaatcattcagcagaagctcctaaaaaataatgagtccttggatgaaggcttgaggctacatacagtgaatgtgagacaactgggtcattgtcttgccatggaggaacccaaaggctactactggccatctatccaaccttctgaatacgttcttccttgtccagacaagcctggcttttctgcttctcggatatgtttttacaatgctaccaacccattggtaacctactggggacctgttgatatctccaactgtttaaaagaagcaaatgaagttgctaaccagattttaaatttaactgctgatgggcagaacttaacctcagccaatattaccaacattgtggaacaggtcaaaagaattgtgaataaagaagaaaacattgatataacacttggctcaactctaatgaatatattttctaatatcttaagcagttcagacagtgacttgcttgagtcatcttctgaagctttaaaaacaattgatgaattggccttcaagatagacctaaatagcacatcacatgtgaatattacaactcggaacttggctctcagcgtatcatccctgttaccagggacaaatgcaatttcaaattttagcattggtcttccaagcaataatgaatcgtatttccagatggattttgagagtggacaagtggatccactggcatctgtaattttgcctccaaacttacttgagaatttaagtccagaagattctgtattagttagaagagcacagtttactttcttcaacaaaactggacttttccaggatgtaggaccccaaagaaaaactttagtgagttatgtgatggcgtgcagtattggaaacattactatccagaatctgaaggatcctgttcaaataaaaatcaaacatacaagaactcaggaagtgcatcatcccatctgtgccttctgggatctgaacaaaaacaaaagttttggaggatggaacacgtcaggatgtgttgcacacagagattcagatgcaagtgagacagtctgcctgtgtaaccacttcacacactttggagttctgatggaccttccaagaagtgcctcacagttagatgcaagaaacactaaagtcctcactttcatcagctatattgggtgtggaatatctgctattttttcagcagcaactctcctgacatatgttgcttttgagaaattgcgaagggattatccctccaaaatcttgatgaacctgagcacagccctgctgttcctgaatctcctcttcctcctagatggctggatcacctccttcaatgtggatggactttgcattgctgttgcagtcctgttgcatttcttccttctggcaacctttacctggatggggctagaagcaattcacatgtacattgctctagttaaagtatttaacacttacattcgccgatacattctaaaattctgcatcattggctggggtttgcctgccttagtggtgtcagttgttctagcgagcagaaacaacaatgaagtctatggaaaagaaagttatgggaaagaaaaaggtgatgaattctgttggattcaagatccagtcatattttatgtgacctgtgctgggtattttggagtcatgttttttctgaacattgccatgttcattgtggtaatggtgcagatctgtgggaggaatggcaagagaagcaaccggaccctgagagaagaagtgttaaggaacctgcgcagtgtggttagcttgacctttctgttgggcatgacatggggttttgcattctttgcctggggacccttaaatatccccttcatgtacctcttctccatcttcaattcattacaaggcttatttatattcatcttccactgtgctatgaaggagaatgttcagaaacagtggcggcggcatctctgctgtggtagatttcggttagcagataactcagattggagtaagacagctaccaatatcatcaagaaaagttctgataatctaggaaaatctttgtcttcaagctccattggttccaactcaacctatcttacatccaaatctaaatccagctctaccacctatttcaaaaggaatagccacacagacagtgcttccatggacaagtccttgtcaaaactggcccatgctgatggagatcaaacatcaatcatccctgtccatcaggtcattgataaggtcaagggttattgcaatgctcattcagacaacttctataaaaatattatcatgtcagacaccttcagccacagcacaaagttttaa

SEQ ID NO: 12 - protein, 1249 aa, Homo sapiens
MFRSDRMWSCHWKWKPSPLLFLFALYIMCVPHSVWGCANCRVVLSNPSGTFTSPCYPNDYPNSQACMWTLRAPTGYIIQITFNDFDIEEAPNCIYDSLSLDNGESQTKFCGATAKGLSFNSSANEMHVSFSSDFSIQKKGFNASYIRVAVSLRNQKVILPQTSDAYQVSVAKSISIPELSAFTLCFEATKVGHEDSDWTAFSYSNASFTQLLSFGKAKSGYFLSISDSKCLLNNALPVKEKEDIFAESFEQLCLVWNNSLGSIGVNFKRNYETVPCDSTISKVIPGNGKLLLGSNQNEIVSLKGDIYNFRLWNFTMNAKILSNLSCNVKGNVVDWQNDFWNIPNLALKAESNLSCGSYLIPLPAAELASCADLGTLCQATVNSPSTTPPTVTTNMPVTNRIDKQRNDGIIYRISVVIQNILRHPEVKVQSKVAEWLNSTFQNWNYTVYVVNISFHLSAGEDKIKVKRSLEDEPRLVLWALLVYNATNNTNLEGKIIQQKLLKNNESLDEGLRLHTVNVRQLGHCLAMEEPKGYYWPSIQPSEYVLPCPDKPGFSASRICFYNATNPLVTYWGPVDISNCLKEANEVANQILNLTADGQNLTSANITNIVEQVKRIVNKEENIDITLGSTLMNIFSNILSSSDSDLLESSSEALKTIDELAFKIDLNSTSHVNITTRNLALSVSSLLPGTNAISNFSIGLPSNNESYFQMDFESGQVDPLASVILPPNLLENLSPEDSVLVRRAQFTFFNKTGLFQDVGPQRKTLVSYVMACSIGNITIQNLKDPVQIKIKHTRTQEVHHPICAFWDLNKNKSFGGWNTSGCVAHRDSDASETVCLCNHFTHFGVLMDLPRSASQLDARNTKVLTFISYIGCGISAIFSAATLLTYVAFEKLRRDYPSKILMNLSTALLFLNLLFLLDGWITSFNVDGLCIAVAVLLHFFLLATFTWMGLEAIHMYIALVKVFNTYIRRYILKFCIIGWGLPALVVSVVLASRNNNEVYGKESYGKEKGDEFCWIQDPVIFYVTCAGYFGVMFFLNIAMFIVVMVQICGRNGKRSNRTLREEVLRNLRSVVSLTFLLGMTWGFAFFAWGPLNIPFMYLFSIFNSLQGLFIFIFHCAMKENVQKQWRRHLCCGRFRLADNSDWSKTATNIIKKSSDNLGKSLSSSSIGSNSTYLTSKSKSSSTTYFKRNSHTDSASMDKSLSKLAHADGDQTSIIPVHQVIDKVKGYCNAHSDNFYKNIIMSDTFSHSTKF

SEQ ID NO: 13 - DNA, 3663 bp, Homo sapiens
  CDS (1)...(3663)
atgtttcgctcagatcgaatgtggagctgccattggaaatggaagcccagtcctctcctgttcttatttgctttatatatcatgtgtgttcctcactcagtgtggggatgtgccaactgccgagtggttttgtccaacccttctgggacctttacttctccatgctaccctaacgactacccaaacagccaggcttgcatgtggacgctccgagcccccaccggttatatcattcagataacatttaacgactttgacattgaagaagctcccaattgcatttatgactcattatcccttgataatggagagagccagactaaattttgtggagcaactgccaaaggcctatcatttaactcaagtgcgaatgagatgcatgtgtccttttcaagtgactttagcatccagaagaaaggtttcaatgccagctacatcagagttgccgtgtccttaaggaatcaaaaggtcattttaccccagacatcagatgcttaccaggtatctgttgcaaaaagcatctctattccagagctcagtgctttcacactctgctttgaagcaaccaaagttggccatgaagacagtgattggacagctttctcctactcaaatgcatccttcacacaattgctcagttttggaaaggccaagagtggctactttctatccatttctgattcaaaatgtttgttgaataatgcattacctgtcaaagaaaaagaagacatttttgcagaaagctttgaacagctctgccttgtttggaataattctttgggctctattggtgtaaatttcaaaagaaactatgaaacagttccatgtgattctaccattagtaaagttattcctgggaatgggaaattgttgttgggctccaatcaaaatgaaattgtctctctaaaaggggacatttataactttcgactttggaattttaccatgaatgccaaaatcctctccaacctcagctgtaatgtgaaagggaatgtagtcgactggcaaaatgacttctggaatatcccaaacctagctctgaaagctgaaagcaacctaagctgtggttcctacctgatcccgctcccagcagcagaactggccagctgtgcagacctggggaccctctgtcaagctactgtaaactctcctagtactacaccacccactgtcaccactaacatgcctgttactaacagaatcgataaacaaaggaatgatggaattatctatagaatatccgtagtgattcagaacatccttcgtcaccctgaggtaaaagtacagagcaaggtggcagaatggctcaattcaaccttccaaaattggaactacacggtttatgtcgttaatatcagttttcacctgagtgctggagaggacaagattaaagtcaagagaagccttgaggatgagccaaggttggtgctttgggcccttctagtttacaatgctaccaacaatactaatttagaaggaaaaatcattcagcagaagctcctaaaaaataatgagtccttggatgaaggcttgaggctacatacagtgaatgtgagacaactgggtcattgtcttgccatggaggaacccaaaggctactactggccatctatccaaccttctgaatacgttcttccttgtccagacaagcctggcttttctgcttctcggatatgtttttacaatgctaccaacccattggtaacctactggggacctgttgatatctccaactgtttaaaagaagcaaatgaagttgctaaccagattttaaatttaactgctgatgggcagaacttaacctcagccaatattaccaacattgtggaacaggtcaaaagaattgtgaataaagaagaaaacattgatataacacttggctcaactctaatgaatatattttctaatatcttaagcagttcagacagtgacttgcttgagtcatcttctgaagctttaaaaacaattgatgaattggccttcaagatagacctaaatagcacatcacatgtgaatattacaactcggaacttggctctcagcgtatcatccctgttaccagggacaaatgcaatttcaaattttagcattggtcttccaagcaataatgaatcgtatttccagatggattttgagagtggacaagtggatccactggcatctgtaattttgcctccaaacttacttgagaatttaagtccagaagattctgtattagttagaagagcacagtttactttcttcaacaaaactggacttttccaggatgtaggaccccaaagaaaaactttagtgagttatgtgatggcgtgcagtattggaaacattactatccagaatctgaaggatcctgttcaaataaaaatcaaacatacaagaactcaggaagtgcatcatcccatctgtgccttctgggatctgaacaaaaacaaaagttttggaggatggaacacgtcaggatgtgttgcacacagagattcagatgcaagtgagacagtctgcctgtgtaaccacttcacacactttggagttctgatggaccttccaagaagtgcctcacagttagatgcaagaaacactaaagtcctcactttcatcagctatattgggtgtggaatatctgctattttttcagcagcaactctcctgacatatgttgcttttgagaaattgcgaagggattatccctccaaaatcttgatgaacctgagcacagccctgctgttcctgaatctcctcttcctcctagatggctggatcacctccttcaatgtggatggactttgcattgctgttgcagtcctgttgcatttcttccttctggcaacctttacctggatggggctagaagcaattcacatgtacattgctctagttaaagtatttaacacttacattcgccgatacattctaaaattctgcatcattggctggggtttgcctgccttagtggtgtcagttgttctagcgagcagaaacaacaatgaagtctatggaaaagaaagttatgggaaagaaaaaggtgatgaattctgttggattcaagatccagtcatattttatgtgacctgtgctgggtattttggagtcatgttttttctgaacattgccatgttcattgtggtaatggtgcagatctgtgggaggaatggcaagagaagcaaccggaccctgagagaagaagtgttaaggaacctgcgcagtgtggttagcttgacctttctgttgggcatgacatggggttttgcattctttgcctggggacccttaaatatccccttcatgtacctcttctccatcttcaattcattacaaggcttatttatattcatcttccactgtgctatgaaggagaatgttcagaaacagtggcggcggcatctctgctgtggtagatttcggttagcagataactcagattggagtaagacagctaccaatatcatcaagaaaagttctgataatctaggaaaatctttgtcttcaagctccattggttccaactcaacctatcttacatccaaatctaaatccagctctaccacctatttcaaaaggaatagccacacagataatgtctcctatgagcattccttcaacaaaagtggatcactcagacagtgcttccatggacaagtccttgtcaaaactggcccatgctga

SEQ ID NO: 14 - protein, 1220 aa, Homo sapiens
MFRSDRMWSCHWKWKPSPLLFLFALYIMCVPHSVWGCANCRVVLSNPSGTFTSPCYPNDYPNSQACMWTLRAPTGYIIQITFNDFDIEEAPNCIYDSLSLDNGESQTKFCGATAKGLSFNSSANEMHVSFSSDFSIQKKGFNASYIRVAVSLRNQKVILPQTSDAYQVSVAKSISIPELSAFTLCFEATKVGHEDSDWTAFSYSNASFTQLLSFGKAKSGYFLSISDSKCLLNNALPVKEKEDIFAESFEQLCLVWNNSLGSIGVNFKRNYETVPCDSTISKVIPGNGKLLLGSNQNEIVSLKGDIYNFRLWNFTMNAKILSNLSCNVKGNVVDWQNDFWNIPNLALKAESNLSCGSYLIPLPAAELASCADLGTLCQATVNSPSTTPPTVTTNMPVTNRIDKQRNDGIIYRISVVIQNILRHPEVKVQSKVAEWLNSTFQNWNYTVYVVNISFHLSAGEDKIKVKRSLEDEPRLVLWALLVYNATNNTNLEGKIIQQKLLKNNESLDEGLRLHTVNVRQLGHCLAMEEPKGYYWPSIQPSEYVLPCPDKPGFSASRICFYNATNPLVTYWGPVDISNCLKEANEVANQILNLTADGQNLTSANITNIVEQVKRIVNKEENIDITLGSTLMNIFSNILSSSDSDLLESSSEALKTIDELAFKIDLNSTSHVNITTRNLALSVSSLLPGTNAISNFSIGLPSNNESYFQMDFESGQVDPLASVILPPNLLENLSPEDSVLVRRAQFTFFNKTGLFQDVGPQRKTLVSYVMACSIGNITIQNLKDPVQIKIKHTRTQEVHHPICAFWDLNKNKSFGGWNTSGCVAHRDSDASETVCLCNHFTHFGVLMDLPRSASQLDARNTKVLTFISYIGCGISAIFSAATLLTYVAFEKLRRDYPSKILMNLSTALLFLNLLFLLDGWITSFNVDGLCIAVAVLLHFFLLATFTWMGLEAIHMYIALVKVFNTYIRRYILKFCIIGWGLPALVVSVVLASRNNNEVYGKESYGKEKGDEFCWIQDPVIFYVTCAGYFGVMFFLNIAMFIVVMVQICGRNGKRSNRTLREEVLRNLRSVVSLTFLLGMTWGFAFFAWGPLNIPFMYLFSIFNSLQGLFIFIFHCAMKENVQKQWRRHLCCGRFRLADNSDWSKTATNIIKKSSDNLGKSLSSSSIGSNSTYLTSKSKSSSTTYFKRNSHTDNVSYEHSFNKSGSLRQCFHGQVLVKTGPC

SEQ ID NO: 15 - DNA, 2154 bp, Homo sapiens
  CDS (1)...(2154)
atgtttcgctcagatcgaatgtggagctgccattggaaatggaagcccagtcctctcctgttcttatttgctttatatatcatgtgtgttcctcactcagtgtggggatgtgccaactgccgagtggttttgtccaacccttctgggacctttacttctccatgctaccctaacgactacccaaacagccaggcttgcatgtggacgctccgagcccccaccggttatatcattcagataacatttaacgactttgacattgaagaagctcccaattgcatttatgactcattatcccttgataatggagagagccagactaaattttgtggagcaactgccaaaggcctatcatttaactcaagtgcgaatgagatgcatgtgtccttttcaagtgactttagcatccagaagaaaggtttcaatgccagctacatcagagttgccgtgtccttaaggaatcaaaaggtcattttaccccagacatcagatgcttaccaggtatctgttgcaaaaagcatctctattccagagctcagtgctttcacactctgctttgaagcaaccaaagttggccatgaagacagtgattggacagctttctcctactcaaatgcatccttcacacaattgctcagttttggaaaggccaagagtggctactttctatccatttctgattcaaaatgtttgttgaataatgcattacctgtcaaagaaaaagaagacatttttgcagaaagctttgaacagctctgccttgtttggaataattctttgggctctattggtgtaaatttcaaaagaaactatgaaacagttccatgtgattctaccattagtaaagttattcctgggaatgggaaattgttgttgggctccaatcaaaatgaaattgtctctctaaaaggggacatttataactttcgactttggaattttaccatgaatgccaaaatcctctccaacctcagctgtaatgtgaaagggaatgtagtcgactggcaaaatgacttctggaatatcccaaacctagctctgaaagctgaaagcaacctaagctgtggttcctacctgatcccgctcccagcagcagaactggccagctgtgcagacctggggaccctctgtcaagctactgtaaactctcctagtactacaccacccactgtcaccactaacatgcctgttactaacagaatcgataaacaaaggaatgatggaattatctatagaatatccgtagtgattcagaacatccttcgtcaccctgaggtaaaagtacagagcaaggtggcagaatggctcaattcaaccttccaaaattggaactacacggtttatgtcgttaatatcagttttcacctgagtgctggagaggacaagattaaagtcaagagaagccttgaggatgagccaaggttggtgctttgggcccttctagtttacaatgctaccaacaatactaatttagaaggaaaaatcattcagcagaagctcctaaaaaataatgagtccttggatgaaggcttgaggctacatacagtgaatgtgagacaactgggtcattgtcttgccatggaggaacccaaaggctactactggccatctatccaaccttctgaatacgttcttccttgtccagacaagcctggcttttctgcttctcggatatgtttttacaatgctaccaacccattggtaacctactggggacctgttgatatctccaactgtttaaaagaagcaaatgaagttgctaaccagattttaaatttaactgctgatgggcagaacttaacctcagccaatattaccaacattgtggaacaggtcaaaagaattgtgaataaagaagaaaacattgatataacacttggctcaactctaatgaatatattttctaatatcttaagcagttcagacagtgacttgcttgagtcatcttctgaagctttaaaaacaattgatgaattggccttcaagatagacctaaatagcacatcacatgtgaatattacaactcggaacttggctctcagcgtatcatccctgttaccagggacaaatgcaatttcaaattttagcattggtcttccaagcaataatgaatcgtatttccaggtaatgagccagtggtttctttcattttaa

SEQ ID NO: 16 - protein, 717 aa, Homo sapiens
MFRSDRMWSCHWKWKPSPLLFLFALYIMCVPHSVWGCANCRVVLSNPSGTFTSPCYPNDYPNSQACMWTLRAPTGYIIQITFNDFDIEEAPNCIYDSLSLDNGESQTKFCGATAKGLSFNSSANEMHVSFSSDFSIQKKGFNASYIRVAVSLRNQKVILPQTSDAYQVSVAKSISIPELSAFTLCFEATKVGHEDSDWTAFSYSNASFTQLLSFGKAKSGYFLSISDSKCLLNNALPVKEKEDIFAESFEQLCLVWNNSLGSIGVNFKRNYETVPCDSTISKVIPGNGKLLLGSNQNEIVSLKGDIYNFRLWNFTMNAKILSNLSCNVKGNVVDWQNDFWNIPNLALKAESNLSCGSYLIPLPAAELASCADLGTLCQATVNSPSTTPPTVTTNMPVTNRIDKQRNDGIIYRISVVIQNILRHPEVKVQSKVAEWLNSTFQNWNYTVYVVNISFHLSAGEDKIKVKRSLEDEPRLVLWALLVYNATNNTNLEGKIIQQKLLKNNESLDEGLRLHTVNVRQLGHCLAMEEPKGYYWPSIQPSEYVLPCPDKPGFSASRICFYNATNPLVTYWGPVDISNCLKEANEVANQILNLTADGQNLTSANITNIVEQVKRIVNKEENIDITLGSTLMNIFSNILSSSDSDLLESSSEALKTIDELAFKIDLNSTSHVNITTRNLALSVSSLLPGTNAISNFSIGLPSNNESYFQVMSQWFLSF

SEQ ID NO: 17 - DNA, 3336 bp, Homo sapiens
  CDS (1)...(3336)
atgtttcgctcagatcgaatgtggagctgccattggaaatggaagcccagtcctctcctgttcttatttgctttatatatcatgtgtgttcctcactcagtgtggggatgtgccaactgccgagtggttttgtccaacccttctgggacctttacttctccatgctaccctaacgactacccaaacagccaggcttgcatgtggacgctccgagcccccaccggttatatcattcagataacatttaacgactttgacattgaagaagctcccaattgcatttatgactcattatcccttgataatggagagagccagactaaattttgtggagcaactgccaaaggcctatcatttaactcaagtgcgaatgagatgcatgtgtccttttcaagtgactttagcatccagaagaaaggtttcaatgccagctacatcagagttgccgtgtccttaaggaatcaaaaggtcattttaccccagacatcagatgcttaccaggtatctgttgcaaaaagcatctctattccagagctcagtgctttcacactctgctttgaagcaaccaaagttggccatgaagacagtgattggacagctttctcctactcaaatgcatccttcacacaattgctcagttttggaaaggccaagagtggctactttctatccatttctgattcaaaatgtttgttgaataatgcattacctgtcaaagaaaaagaagacatttttgcagaaagctttgaacagctctgccttgtttggaataattctttgggctctattggtgtaaatttcaaaagaaactatgaaacagttccatgtgattctaccattagtaaagttattcctgggaatgggaaattgttgttgggctccaatcaaaatgaaattgtctctctaaaaggggacatttataactttcgactttggaattttaccatgaatgccaaaatcctctccaacctcagctgtaatgtgaaagggaatgtagtcgactggcaaaatgacttctggaatatcccaaacctagctctgaaagctgaaagcaacctaagctgtggttcctacctgatcccgctcccagcagcagaactggccagctgtgcagacctggggaccctctgtcaagctactgtaaactctcctagtactacaccacccactgtcaccactaacatgcctgttactaacagaatcgataaacaaaggaatgatggaattatctatagaatatccgtagtgattcagaacatccttcgtcaccctgaggtaaaagtacagagcaaggtggcagaatggctcaattcaaccttccaaaattggaactacacggtttatgtcgttaatatcagttttcacctgagtgctggagaggacaagattaaagtcaagagaagccttgaggatgagccaaggttggtgctttgggcccttctagtttacaatgctaccaacaatactaatttagaaggaaaaatcattcagcagaagctcctaaaaaataatgagtccttggatgaaggcttgaggctacatacagtgaatgtgagacaactgggtcattgtcttgccatggaggaacccaaaggctactactggccatctatccaaccttctgaatacgttcttccttgtccagacaagcctggcttttctgcttctcggatatgtttttacaatgctaccaacccattggtaacctactggggacctgttgatatctccaactgtttaaaagaagcaaatgaagttgctaaccagattttaaatttaactgctgatgggcagaacttaacctcagccaatattaccaacattgtggaacaggtcaaaagaattgtgaataaagaagaaaacattgatataacacttggctcaactctaatgaatatattttctaatatcttaagcagttcagacagtgacttgcttgagtcatcttctgaagctttaaaaacaattgatgaattggccttcaagatagacctaaatagcacatcacatgtgaatattacaactcggaacttggctctcagcgtatcatccctgttaccagggacaaatgcaatttcaaattttagcattggtcttccaagcaataatgaatcgtatttccagatggattttgagagtggacaagtggatccactggcatctgtaattttgcctccaaacttacttgagaatttaagtccagaagattctgtattagttagaagagcacagtttactttcttcaacaaaactggacttttccaggatgtaggaccccaaagaaaaactttagtgagttatgtgatggcgtgcagtattggaaacattactatccagaatctgaaggatcctgttcaaataaaaatcaaacatacaagaactcaggaagtgcatcatcccatctgtgccttctgggatctgaacaaaaacaaaagttttggaggatggaacacgtcaggatgtgttgcacacagagattcagatgcaagtgagacagtctgcctgtgtaaccacttcacacactttggagttctgatggaccttccaagaagtgcctcacagttagatgcaagaaacactaaagtcctcactttcatcagctatattgggtgtggaatatctgctattttttcagcagcaactctcctgacatatgttgcttttgagaaattgcgaagggattatccctccaaaatcttgatgaacctgagcacagccctgctgttcctgaatctcctcttcctcctagatggctggatcacctccttcaatgtggatggactttgcattgctgttgcagtcctgttgcatttcttccttctggcaacctttacctggatggggctagaagcaattcacatgtacattgctctagttaaagtatttaacacttacattcgccgatacattctaaaattctgcatcattggctggggtttgcctgccttagtggtgtcagttgttctagcgagcagaaacaacaatgaagtctatggaaaagaaagttatgggaaagaaaaaggtgatgaattctgttggattcaagatccagtcatattttatgtgacctgtgctgggtattttggagtcatgttttttctgaacattgccatgttcattgtggtaatggtgcagatctgtgggaggaatggcaagagaagcaaccggaccctgagagaagaagtgttaaggaacctgcgcagtgtggttagcttgacctttctgttgggcatgacatggggttttgcattctttgcctggggacccttaaatatccccttcatgtacctcttctccatcttcaattcattacaaggtaagataaattgtacatga

SEQ ID NO: 18 - protein, 1111 aa, Homo sapiens
MFRSDRMWSCHWKWKPSPLLFLFALYIMCVPHSVWGCANCRVVLSNPSGTFTSPCYPNDYPNSQACMWTLRAPTGYIIQITFNDFDIEEAPNCIYDSLSLDNGESQTKFCGATAKGLSFNSSANEMHVSFSSDFSIQKKGFNASYIRVAVSLRNQKVILPQTSDAYQVSVAKSISIPELSAFTLCFEATKVGHEDSDWTAFSYSNASFTQLLSFGKAKSGYFLSISDSKCLLNNALPVKEKEDIFAESFEQLCLVWNNSLGSIGVNFKRNYETVPCDSTISKVIPGNGKLLLGSNQNEIVSLKGDIYNFRLWNFTMNAKILSNLSCNVKGNVVDWQNDFWNIPNLALKAESNLSCGSYLIPLPAAELASCADLGTLCQATVNSPSTTPPTVTTNMPVTNRIDKQRNDGIIYRISVVIQNILRHPEVKVQSKVAEWLNSTFQNWNYTVYVVNISFHLSAGEDKIKVKRSLEDEPRLVLWALLVYNATNNTNLEGKIIQQKLLKNNESLDEGLRLHTVNVRQLGHCLAMEEPKGYYWPSIQPSEYVLPCPDKPGFSASRICFYNATNPLVTYWGPVDISNCLKEANEVANQILNLTADGQNLTSANITNIVEQVKRIVNKEENIDITLGSTLMNIFSNILSSSDSDLLESSSEALKTIDELAFKIDLNSTSHVNITTRNLALSVSSLLPGTNAISNFSIGLPSNNESYFQMDFESGQVDPLASVILPPNLLENLSPEDSVLVRRAQFTFFNKTGLFQDVGPQRKTLVSYVMACSIGNITIQNLKDPVQIKIKHTRTQEVHHPICAFWDLNKNKSFGGWNTSGCVAHRDSDASETVCLCNHFTHFGVLMDLPRSASQLDARNTKVLTFISYIGCGISAIFSAATLLTYVAFEKLRRDYPSKILMNLSTALLFLNLLFLLDGWITSFNVDGLCIAVAVLLHFFLLATFTWMGLEAIHMYIALVKVFNTYIRRYILKFCIIGWGLPALVVSVVLASRNNNEVYGKESYGKEKGDEFCWIQDPVIFYVTCAGYFGVMFFLNIAMFIVVMVQICGRNGKRSNRTLREEVLRNLRSVVSLTFLLGMTWGFAFFAWGPLNIPFMYLFSIFNSLQGKINCT

SEQ ID NO: 19 - DNA, 3753 bp, Homo sapiens
  CDS (1)...(3753)
atgatgtttcgctcagatcgaatgtggagctgccattggaaatggaagcccagtcctctcctgttcttatttgctttatatatcatgtgtgttcctcactcagtgtggggatgtgccaactgccgagtggttttgtccaacccttctgggacctttacttctccatgctaccctaacgactacccaaacagccaggcttgcatgtggacgctccgagcccccaccggttatatcattcagataacatttaacgactttgacattgaagaagctcccaattgcatttatgactcattatcccttgataatggagagagccagactaaattttgtggagcaactgccaaaggcctatcatttaactcaagtgcgaatgagatgcatgtgtccttttcaagtgactttagcatccagaagaaaggtttcaatgccagctacatcagagttgccgtgtccttaaggaatcaaaaggtcattttaccccagacatcagatgcttaccaggtatctgttgcaaaaagcatctctattccagagctcagtgctttcacactctgctttgaagcaaccaaagttggccatgaagacagtgattggacagctttctcctactcaaatgcatccttcacacaattgctcagttttggaaaggccaagagtggctactttctatccatttctgattcaaaatgtttgttgaataatgcattacctgtcaaagaaaaagaagacatttttgcagaaagctttgaacagctctgccttgtttggaataattctttgggctctattggtgtaaatttcaaaagaaactatgaaacagttccatgtgattctaccattagtaaagttattcctgggaatgggaaattgttgttgggctccaatcaaaatgaaattgtctctctaaaaggggacatttataactttcgactttggaattttaccatgaatgccaaaatcctctccaacctcagctgtaatgtgaaagggaatgtagtcgactggcaaaatgacttctggaatatcccaaacctagctctgaaagctgaaagcaacctaagctgtggttcctacctgatcccgctcccagcagcagaactggccagctgtgcagacctggggaccctctgtcaagctactgtaaactctcctagtactacaccacccactgtcaccactaacatgcctgttactaacagaatcgataaacaaaggaatgatggaattatctatagaatatccgtagtgattcagaacatccttcgtcaccctgaggtaaaagtacagagcaaggtggcagaatggctcaattcaaccttccaaaattggaactacacggtttatgtcgttaatatcagttttcacctgagtgctggagaggacaagattaaagtcaagagaagccttgaggatgagccaaggttggtgctttgggcccttctagtttacaatgctaccaacaatactaatttagaaggaaaaatcattcagcagaagctcctaaaaaataatgagtccttggatgaaggcttgaggctacatacagtgaatgtgagacaactgggtcattgtcttgccatggaggaacccaaaggctactactggccatctatccaaccttctgaatacgttcttccttgtccagacaagcctggcttttctgcttctcggatatgtttttacaatgctaccaacccattggtaacctactggggacctgttgatatctccaactgtttaaaagaagcaaatgaagttgctaaccagattttaaatttaactgctgatgggcagaacttaacctcagccaatattaccaacattgtggaacaggtcaaaagaattgtgaataaagaagaaaacattgatataacacttggctcaactctaatgaatatattttctaatatcttaagcagttcagacagtgacttgcttgagtcatcttctgaagctttaaaaacaattgatgaattggccttcaagatagacctaaatagcacatcacatgtgaatattacaactcggaacttggctctcagcgtatcatccctgttaccagggacaaatgcaatttcaaattttagcattggtcttccaagcaataatgaatcgtatttccagatggattttgagagtggacaagtggatccactggcatctgtaattttgcctccaaacttacttgagaatttaagtccagaagattctgtattagttagaagagcacagtttactttcttcaacaaaactggacttttccaggatgtaggaccccaaagaaaaactttagtgagttatgtgatggcgtgcagtattggaaacattactatccagaatctgaaggatcctgttcaaataaaaatcaaacatacaagaactcaggaagtgcatcatcccatctgtgccttctgggatctgaacaaaaacaaaagttttggaggatggaacacgtcaggatgtgttgcacacagagattcagatgcaagtgagacagtctgcctgtgtaaccacttcacacactttggagttctgatggaccttccaagaagtgcctcacagttagatgcaagaaacactaaagtcctcactttcatcagctatattgggtgtggaatatctgctattttttcagcagcaactctcctgacatatgttgcttttgagaaattgcgaagggattatccctccaaaatcttgatgaacctgagcacagccctgctgttcctgaatctcctcttcctcctagatggctggatcacctccttcaatgtggatggactttgcattgctgttgcagtcctgttgcatttcttccttctggcaacctttacctggatggggctagaagcaattcacatgtacattgctctagttaaagtatttaacacttacattcgccgatacattctaaaattctgcatcattggctggggtttgcctgccttagtggtgtcagttgttctagcgagcagaaacaacaatgaagtctatggaaaagaaagttatgggaaagaaaaaggtgatgaattctgttggattcaagatccagtcatattttatgtgacctgtgctgggtattttggagtcatgttttttctgaacattgccatgttcattgtggtaatggtgcagatctgtgggaggaatggcaagagaagcaaccggaccctgagagaagaagtgttaaggaacctgcgcagtgtggttagcttgacctttctgttgggcatgacatggggttttgcattctttgcctggggacccttaaatatccccttcatgtacctcttctccatcttcaattcattacaaggcttatttatattcatcttccactgtgctatgaaggagaatgttcagaaacagtggcggcggcatctctgctgtggtagatttcggttagcagataactcagattggagtaagacagctaccaatatcatcaagaaaagttctgataatctaggaaaatctttgtcttcaagctccattggttccaactcaacctatcttacatccaaatctaaatccagctctaccacctatttcaaaaggaatagccacacagacagtgcttccatggacaagtccttgtcaaaactggcccatgctgatggagatcaaacatcaatcatccctgtccatcaggtcattgataaggtcaagggttattgcaatgctcattcagacaacttctataaaaatattatcatgtcagacaccttcagccacagcacaaagttttaa

SEQ ID NO: 20 - protein, 1250 aa, Homo sapiens
MMFRSDRMWSCHWKWKPSPLLFLFALYIMCVPHSVWGCANCRVVLSNPSGTFTSPCYPNDYPNSQACMWTLRAPTGYIIQITFNDFDIEEAPNCIYDSLSLDNGESQTKFCGATAKGLSFNSSANEMHVSFSSDFSIQKKGFNASYIRVAVSLRNQKVILPQTSDAYQVSVAKSISIPELSAFTLCFEATKVGHEDSDWTAFSYSNASFTQLLSFGKAKSGYFLSISDSKCLLNNALPVKEKEDIFAESFEQLCLVWNNSLGSIGVNFKRNYETVPCDSTISKVIPGNGKLLLGSNQNEIVSLKGDIYNFRLWNFTMNAKILSNLSCNVKGNVVDWQNDFWNIPNLALKAESNLSCGSYLIPLPAAELASCADLGTLCQATVNSPSTTPPTVTTNMPVTNRIDKQRNDGIIYRISVVIQNILRHPEVKVQSKVAEWLNSTFQNWNYTVYVVNISFHLSAGEDKIKVKRSLEDEPRLVLWALLVYNATNNTNLEGKIIQQKLLKNNESLDEGLRLHTVNVRQLGHCLAMEEPKGYYWPSIQPSEYVLPCPDKPGFSASRICFYNATNPLVTYWGPVDISNCLKEANEVANQILNLTADGQNLTSANITNIVEQVKRIVNKEENIDITLGSTLMNIFSNILSSSDSDLLESSSEALKTIDELAFKIDLNSTSHVNITTRNLALSVSSLLPGTNAISNFSIGLPSNNESYFQMDFESGQVDPLASVILPPNLLENLSPEDSVLVRRAQFTFFNKTGLFQDVGPQRKTLVSYVMACSIGNITIQNLKDPVQIKIKHTRTQEVHHPICAFWDLNKNKSFGGWNTSGCVAHRDSDASETVCLCNHFTHFGVLMDLPRSASQLDARNTKVLTFISYIGCGISAIFSAATLLTYVAFEKLRRDYPSKILMNLSTALLFLNLLFLLDGWITSFNVDGLCIAVAVLLHFFLLATFTWMGLEAIHMYIALVKVFNTYIRRYILKFCIIGWGLPALVVSVVLASRNNNEVYGKESYGKEKGDEFCWIQDPVIFYVTCAGYFGVMFFLNIAMFIVVMVQICGRNGKRSNRTLREEVLRNLRSVVSLTFLLGMTWGFAFFAWGPLNIPFMYLFSIFNSLQGLFIFIFHCAMKENVQKQWRRHLCCGRFRLADNSDWSKTATNIIKKSSDNLGKSLSSSSIGSNSTYLTSKSKSSSTTYFKRNSHTDSASMDKSLSKLAHADGDQTSIIPVHQVIDKVKGYCNAHSDNFYKNIIMSDTFSHSTKF

SEQ ID NO: 21 - DNA, 3666 bp, Homo sapiens
  CDS (1)...(3666)
atgatgtttcgctcagatcgaatgtggagctgccattggaaatggaagcccagtcctctcctgttcttatttgctttatatatcatgtgtgttcctcactcagtgtggggatgtgccaactgccgagtggttttgtccaacccttctgggacctttacttctccatgctaccctaacgactacccaaacagccaggcttgcatgtggacgctccgagcccccaccggttatatcattcagataacatttaacgactttgacattgaagaagctcccaattgcatttatgactcattatcccttgataatggagagagccagactaaattttgtggagcaactgccaaaggcctatcatttaactcaagtgcgaatgagatgcatgtgtccttttcaagtgactttagcatccagaagaaaggtttcaatgccagctacatcagagttgccgtgtccttaaggaatcaaaaggtcattttaccccagacatcagatgcttaccaggtatctgttgcaaaaagcatctctattccagagctcagtgctttcacactctgctttgaagcaaccaaagttggccatgaagacagtgattggacagctttctcctactcaaatgcatccttcacacaattgctcagttttggaaaggccaagagtggctactttctatccatttctgattcaaaatgtttgttgaataatgcattacctgtcaaagaaaaagaagacatttttgcagaaagctttgaacagctctgccttgtttggaataattctttgggctctattggtgtaaatttcaaaagaaactatgaaacagttccatgtgattctaccattagtaaagttattcctgggaatgggaaattgttgttgggctccaatcaaaatgaaattgtctctctaaaaggggacatttataactttcgactttggaattttaccatgaatgccaaaatcctctccaacctcagctgtaatgtgaaagggaatgtagtcgactggcaaaatgacttctggaatatcccaaacctagctctgaaagctgaaagcaacctaagctgtggttcctacctgatcccgctcccagcagcagaactggccagctgtgcagacctggggaccctctgtcaagctactgtaaactctcctagtactacaccacccactgtcaccactaacatgcctgttactaacagaatcgataaacaaaggaatgatggaattatctatagaatatccgtagtgattcagaacatccttcgtcaccctgaggtaaaagtacagagcaaggtggcagaatggctcaattcaaccttccaaaattggaactacacggtttatgtcgttaatatcagttttcacctgagtgctggagaggacaagattaaagtcaagagaagccttgaggatgagccaaggttggtgctttgggcccttctagtttacaatgctaccaacaatactaatttagaaggaaaaatcattcagcagaagctcctaaaaaataatgagtccttggatgaaggcttgaggctacatacagtgaatgtgagacaactgggtcattgtcttgccatggaggaacccaaaggctactactggccatctatccaaccttctgaatacgttcttccttgtccagacaagcctggcttttctgcttctcggatatgtttttacaatgctaccaacccattggtaacctactggggacctgttgatatctccaactgtttaaaagaagcaaatgaagttgctaaccagattttaaatttaactgctgatgggcagaacttaacctcagccaatattaccaacattgtggaacaggtcaaaagaattgtgaataaagaagaaaacattgatataacacttggctcaactctaatgaatatattttctaatatcttaagcagttcagacagtgacttgcttgagtcatcttctgaagctttaaaaacaattgatgaattggccttcaagatagacctaaatagcacatcacatgtgaatattacaactcggaacttggctctcagcgtatcatccctgttaccagggacaaatgcaatttcaaattttagcattggtcttccaagcaataatgaatcgtatttccagatggattttgagagtggacaagtggatccactggcatctgtaattttgcctccaaacttacttgagaatttaagtccagaagattctgtattagttagaagagcacagtttactttcttcaacaaaactggacttttccaggatgtaggaccccaaagaaaaactttagtgagttatgtgatggcgtgcagtattggaaacattactatccagaatctgaaggatcctgttcaaataaaaatcaaacatacaagaactcaggaagtgcatcatcccatctgtgccttctgggatctgaacaaaaacaaaagttttggaggatggaacacgtcaggatgtgttgcacacagagattcagatgcaagtgagacagtctgcctgtgtaaccacttcacacactttggagttctgatggaccttccaagaagtgcctcacagttagatgcaagaaacactaaagtcctcactttcatcagctatattgggtgtggaatatctgctattttttcagcagcaactctcctgacatatgttgcttttgagaaattgcgaagggattatccctccaaaatcttgatgaacctgagcacagccctgctgttcctgaatctcctcttcctcctagatggctggatcacctccttcaatgtggatggactttgcattgctgttgcagtcctgttgcatttcttccttctggcaacctttacctggatggggctagaagcaattcacatgtacattgctctagttaaagtatttaacacttacattcgccgatacattctaaaattctgcatcattggctggggtttgcctgccttagtggtgtcagttgttctagcgagcagaaacaacaatgaagtctatggaaaagaaagttatgggaaagaaaaaggtgatgaattctgttggattcaagatccagtcatattttatgtgacctgtgctgggtattttggagtcatgttttttctgaacattgccatgttcattgtggtaatggtgcagatctgtgggaggaatggcaagagaagcaaccggaccctgagagaagaagtgttaaggaacctgcgcagtgtggttagcttgacctttctgttgggcatgacatggggttttgcattctttgcctggggacccttaaatatccccttcatgtacctcttctccatcttcaattcattacaaggcttatttatattcatcttccactgtgctatgaaggagaatgttcagaaacagtggcggcggcatctctgctgtggtagatttcggttagcagataactcagattggagtaagacagctaccaatatcatcaagaaaagttctgataatctaggaaaatctttgtcttcaagctccattggttccaactcaacctatcttacatccaaatctaaatccagctctaccacctatttcaaaaggaatagccacacagataatgtctcctatgagcattccttcaacaaaagtggatcactcagacagtgcttccatggacaagtccttgtcaaaactggcccatgctga

SEQ ID NO: 22 - protein, 1221 aa, Homo sapiens
MMFRSDRMWSCHWKWKPSPLLFLFALYIMCVPHSVWGCANCRVVLSNPSGTFTSPCYPNDYPNSQACMWTLRAPTGYIIQITFNDFDIEEAPNCIYDSLSLDNGESQTKFCGATAKGLSFNSSANEMHVSFSSDFSIQKKGFNASYIRVAVSLRNQKVILPQTSDAYQVSVAKSISIPELSAFTLCFEATKVGHEDSDWTAFSYSNASFTQLLSFGKAKSGYFLSISDSKCLLNNALPVKEKEDIFAESFEQLCLVWNNSLGSIGVNFKRNYETVPCDSTISKVIPGNGKLLLGSNQNEIVSLKGDIYNFRLWNFTMNAKILSNLSCNVKGNVVDWQNDFWNIPNLALKAESNLSCGSYLIPLPAAELASCADLGTLCQATVNSPSTTPPTVTTNMPVTNRIDKQRNDGIIYRISVVIQNILRHPEVKVQSKVAEWLNSTFQNWNYTVYVVNISFHLSAGEDKIKVKRSLEDEPRLVLWALLVYNATNNTNLEGKIIQQKLLKNNESLDEGLRLHTVNVRQLGHCLAMEEPKGYYWPSIQPSEYVLPCPDKPGFSASRICFYNATNPLVTYWGPVDISNCLKEANEVANQILNLTADGQNLTSANITNIVEQVKRIVNKEENIDITLGSTLMNIFSNILSSSDSDLLESSSEALKTIDELAFKIDLNSTSHVNITTRNLALSVSSLLPGTNAISNFSIGLPSNNESYFQMDFESGQVDPLASVILPPNLLENLSPEDSVLVRRAQFTFFNKTGLFQDVGPQRKTLVSYVMACSIGNITIQNLKDPVQIKIKHTRTQEVHHPICAFWDLNKNKSFGGWNTSGCVAHRDSDASETVCLCNHFTHFGVLMDLPRSASQLDARNTKVLTFISYIGCGISAIFSAATLLTYVAFEKLRRDYPSKILMNLSTALLFLNLLFLLDGWITSFNVDGLCIAVAVLLHFFLLATFTWMGLEAIHMYIALVKVFNTYIRRYILKFCIIGWGLPALVVSVVLASRNNNEVYGKESYGKEKGDEFCWIQDPVIFYVTCAGYFGVMFFLNIAMFIVVMVQICGRNGKRSNRTLREEVLRNLRSVVSLTFLLGMTWGFAFFAWGPLNIPFMYLFSIFNSLQGLFIFIFHCAMKENVQKQWRRHLCCGRFRLADNSDWSKTATNIIKKSSDNLGKSLSSSSIGSNSTYLTSKSKSSSTTYFKRNSHTDNVSYEHSFNKSGSLRQCFHGQVLVKTGPC

SEQ ID NO: 23 - DNA, 2157 bp, Homo sapiens
  CDS (1)...(2157)
atgatgtttcgctcagatcgaatgtggagctgccattggaaatggaagcccagtcctctcctgttcttatttgctttatatatcatgtgtgttcctcactcagtgtggggatgtgccaactgccgagtggttttgtccaacccttctgggacctttacttctccatgctaccctaacgactacccaaacagccaggcttgcatgtggacgctccgagcccccaccggttatatcattcagataacatttaacgactttgacattgaagaagctcccaattgcatttatgactcattatcccttgataatggagagagccagactaaattttgtggagcaactgccaaaggcctatcatttaactcaagtgcgaatgagatgcatgtgtccttttcaagtgactttagcatccagaagaaaggtttcaatgccagctacatcagagttgccgtgtccttaaggaatcaaaaggtcattttaccccagacatcagatgcttaccaggtatctgttgcaaaaagcatctctattccagagctcagtgctttcacactctgctttgaagcaaccaaagttggccatgaagacagtgattggacagctttctcctactcaaatgcatccttcacacaattgctcagttttggaaaggccaagagtggctactttctatccatttctgattcaaaatgtttgttgaataatgcattacctgtcaaagaaaaagaagacatttttgcagaaagctttgaacagctctgccttgtttggaataattctttgggctctattggtgtaaatttcaaaagaaactatgaaacagttccatgtgattctaccattagtaaagttattcctgggaatgggaaattgttgttgggctccaatcaaaatgaaattgtctctctaaaaggggacatttataactttcgactttggaattttaccatgaatgccaaaatcctctccaacctcagctgtaatgtgaaagggaatgtagtcgactggcaaaatgacttctggaatatcccaaacctagctctgaaagctgaaagcaacctaagctgtggttcctacctgatcccgctcccagcagcagaactggccagctgtgcagacctggggaccctctgtcaagctactgtaaactctcctagtactacaccacccactgtcaccactaacatgcctgttactaacagaatcgataaacaaaggaatgatggaattatctatagaatatccgtagtgattcagaacatccttcgtcaccctgaggtaaaagtacagagcaaggtggcagaatggctcaattcaaccttccaaaattggaactacacggtttatgtcgttaatatcagttttcacctgagtgctggagaggacaagattaaagtcaagagaagccttgaggatgagccaaggttggtgctttgggcccttctagtttacaatgctaccaacaatactaatttagaaggaaaaatcattcagcagaagctcctaaaaaataatgagtccttggatgaaggcttgaggctacatacagtgaatgtgagacaactgggtcattgtcttgccatggaggaacccaaaggctactactggccatctatccaaccttctgaatacgttcttccttgtccagacaagcctggcttttctgcttctcggatatgtttttacaatgctaccaacccattggtaacctactggggacctgttgatatctccaactgtttaaaagaagcaaatgaagttgctaaccagattttaaatttaactgctgatgggcagaacttaacctcagccaatattaccaacattgtggaacaggtcaaaagaattgtgaataaagaagaaaacattgatataacacttggctcaactctaatgaatatattttctaatatcttaagcagttcagacagtgacttgcttgagtcatcttctgaagctttaaaaacaattgatgaattggccttcaagatagacctaaatagcacatcacatgtgaatattacaactcggaacttggctctcagcgtatcatccctgttaccagggacaaatgcaatttcaaattttagcattggtcttccaagcaataatgaatcgtatttccaggtaatgagccagtggtttctttcattttaa

SEQ ID NO: 24 - protein, 718 aa, Homo sapiens
MMFRSDRMWSCHWKWKPSPLLFLFALYIMCVPHSVWGCANCRVVLSNPSGTFTSPCYPNDYPNSQACMWTLRAPTGYIIQITFNDFDIEEAPNCIYDSLSLDNGESQTKFCGATAKGLSFNSSANEMHVSFSSDFSIQKKGFNASYIRVAVSLRNQKVILPQTSDAYQVSVAKSISIPELSAFTLCFEATKVGHEDSDWTAFSYSNASFTQLLSFGKAKSGYFLSISDSKCLLNNALPVKEKEDIFAESFEQLCLVWNNSLGSIGVNFKRNYETVPCDSTISKVIPGNGKLLLGSNQNEIVSLKGDIYNFRLWNFTMNAKILSNLSCNVKGNVVDWQNDFWNIPNLALKAESNLSCGSYLIPLPAAELASCADLGTLCQATVNSPSTTPPTVTTNMPVTNRIDKQRNDGIIYRISVVIQNILRHPEVKVQSKVAEWLNSTFQNWNYTVYVVNISFHLSAGEDKIKVKRSLEDEPRLVLWALLVYNATNNTNLEGKIIQQKLLKNNESLDEGLRLHTVNVRQLGHCLAMEEPKGYYWPSIQPSEYVLPCPDKPGFSASRICFYNATNPLVTYWGPVDISNCLKEANEVANQILNLTADGQNLTSANITNIVEQVKRIVNKEENIDITLGSTLMNIFSNILSSSDSDLLESSSEALKTIDELAFKIDLNSTSHVNITTRNLALSVSSLLPGTNAISNFSIGLPSNNESYFQVMSQWFLSF

SEQ ID NO: 25 - DNA, 3339 bp, Homo sapiens
  CDS (1)...(3339)
atgatgtttcgctcagatcgaatgtggagctgccattggaaatggaagcccagtcctctcctgttcttatttgctttatatatcatgtgtgttcctcactcagtgtggggatgtgccaactgccgagtggttttgtccaacccttctgggacctttacttctccatgctaccctaacgactacccaaacagccaggcttgcatgtggacgctccgagcccccaccggttatatcattcagataacatttaacgactttgacattgaagaagctcccaattgcatttatgactcattatcccttgataatggagagagccagactaaattttgtggagcaactgccaaaggcctatcatttaactcaagtgcgaatgagatgcatgtgtccttttcaagtgactttagcatccagaagaaaggtttcaatgccagctacatcagagttgccgtgtccttaaggaatcaaaaggtcattttaccccagacatcagatgcttaccaggtatctgttgcaaaaagcatctctattccagagctcagtgctttcacactctgctttgaagcaaccaaagttggccatgaagacagtgattggacagctttctcctactcaaatgcatccttcacacaattgctcagttttggaaaggccaagagtggctactttctatccatttctgattcaaaatgtttgttgaataatgcattacctgtcaaagaaaaagaagacatttttgcagaaagctttgaacagctctgccttgtttggaataattctttgggctctattggtgtaaatttcaaaagaaactatgaaacagttccatgtgattctaccattagtaaagttattcctgggaatgggaaattgttgttgggctccaatcaaaatgaaattgtctctctaaaaggggacatttataactttcgactttggaattttaccatgaatgccaaaatcctctccaacctcagctgtaatgtgaaagggaatgtagtcgactggcaaaatgacttctggaatatcccaaacctagctctgaaagctgaaagcaacctaagctgtggttcctacctgatcccgctcccagcagcagaactggccagctgtgcagacctggggaccctctgtcaagctactgtaaactctcctagtactacaccacccactgtcaccactaacatgcctgttactaacagaatcgataaacaaaggaatgatggaattatctatagaatatccgtagtgattcagaacatccttcgtcaccctgaggtaaaagtacagagcaaggtggcagaatggctcaattcaaccttccaaaattggaactacacggtttatgtcgttaatatcagttttcacctgagtgctggagaggacaagattaaagtcaagagaagccttgaggatgagccaaggttggtgctttgggcccttctagtttacaatgctaccaacaatactaatttagaaggaaaaatcattcagcagaagctcctaaaaaataatgagtccttggatgaaggcttgaggctacatacagtgaatgtgagacaactgggtcattgtcttgccatggaggaacccaaaggctactactggccatctatccaaccttctgaatacgttcttccttgtccagacaagcctggcttttctgcttctcggatatgtttttacaatgctaccaacccattggtaacctactggggacctgttgatatctccaactgtttaaaagaagcaaatgaagttgctaaccagattttaaatttaactgctgatgggcagaacttaacctcagccaatattaccaacattgtggaacaggtcaaaagaattgtgaataaagaagaaaacattgatataacacttggctcaactctaatgaatatattttctaatatcttaagcagttcagacagtgacttgcttgagtcatcttctgaagctttaaaaacaattgatgaattggccttcaagatagacctaaatagcacatcacatgtgaatattacaactcggaacttggctctcagcgtatcatccctgttaccagggacaaatgcaatttcaaattttagcattggtcttccaagcaataatgaatcgtatttccagatggattttgagagtggacaagtggatccactggcatctgtaattttgcctccaaacttacttgagaatttaagtccagaagattctgtattagttagaagagcacagtttactttcttcaacaaaactggacttttccaggatgtaggaccccaaagaaaaactttagtgagttatgtgatggcgtgcagtattggaaacattactatccagaatctgaaggatcctgttcaaataaaaatcaaacatacaagaactcaggaagtgcatcatcccatctgtgccttctgggatctgaacaaaaacaaaagttttggaggatggaacacgtcaggatgtgttgcacacagagattcagatgcaagtgagacagtctgcctgtgtaaccacttcacacactttggagttctgatggaccttccaagaagtgcctcacagttagatgcaagaaacactaaagtcctcactttcatcagctatattgggtgtggaatatctgctattttttcagcagcaactctcctgacatatgttgcttttgagaaattgcgaagggattatccctccaaaatcttgatgaacctgagcacagccctgctgttcctgaatctcctcttcctcctagatggctggatcacctccttcaatgtggatggactttgcattgctgttgcagtcctgttgcatttcttccttctggcaacctttacctggatggggctagaagcaattcacatgtacattgctctagttaaagtatttaacacttacattcgccgatacattctaaaattctgcatcattggctggggtttgcctgccttagtggtgtcagttgttctagcgagcagaaacaacaatgaagtctatggaaaagaaagttatgggaaagaaaaaggtgatgaattctgttggattcaagatccagtcatattttatgtgacctgtgctgggtattttggagtcatgttttttctgaacattgccatgttcattgtggtaatggtgcagatctgtgggaggaatggcaagagaagcaaccggaccctgagagaagaagtgttaaggaacctgcgcagtgtggttagcttgacctttctgttgggcatgacatggggttttgcattctttgcctggggacccttaaatatccccttcatgtacctcttctccatcttcaattcattacaaggtaagataaattgtacatga

SEQ ID NO: 26 - protein, 1112 aa, Homo sapiens
MMFRSDRMWSCHWKWKPSPLLFLFALYIMCVPHSVWGCANCRVVLSNPSGTFTSPCYPNDYPNSQACMWTLRAPTGYIIQITFNDFDIEEAPNCIYDSLSLDNGESQTKFCGATAKGLSFNSSANEMHVSFSSDFSIQKKGFNASYIRVAVSLRNQKVILPQTSDAYQVSVAKSISIPELSAFTLCFEATKVGHEDSDWTAFSYSNASFTQLLSFGKAKSGYFLSISDSKCLLNNALPVKEKEDIFAESFEQLCLVWNNSLGSIGVNFKRNYETVPCDSTISKVIPGNGKLLLGSNQNEIVSLKGDIYNFRLWNFTMNAKILSNLSCNVKGNVVDWQNDFWNIPNLALKAESNLSCGSYLIPLPAAELASCADLGTLCQATVNSPSTTPPTVTTNMPVTNRIDKQRNDGIIYRISVVIQNILRHPEVKVQSKVAEWLNSTFQNWNYTVYVVNISFHLSAGEDKIKVKRSLEDEPRLVLWALLVYNATNNTNLEGKIIQQKLLKNNESLDEGLRLHTVNVRQLGHCLAMEEPKGYYWPSIQPSEYVLPCPDKPGFSASRICFYNATNPLVTYWGPVDISNCLKEANEVANQILNLTADGQNLTSANITNIVEQVKRIVNKEENIDITLGSTLMNIFSNILSSSDSDLLESSSEALKTIDELAFKIDLNSTSHVNITTRNLALSVSSLLPGTNAISNFSIGLPSNNESYFQMDFESGQVDPLASVILPPNLLENLSPEDSVLVRRAQFTFFNKTGLFQDVGPQRKTLVSYVMACSIGNITIQNLKDPVQIKIKHTRTQEVHHPICAFWDLNKNKSFGGWNTSGCVAHRDSDASETVCLCNHFTHFGVLMDLPRSASQLDARNTKVLTFISYIGCGISAIFSAATLLTYVAFEKLRRDYPSKILMNLSTALLFLNLLFLLDGWITSFNVDGLCIAVAVLLHFFLLATFTWMGLEAIHMYIALVKVFNTYIRRYILKFCIIGWGLPALVVSVVLASRNNNEVYGKESYGKEKGDEFCWIQDPVIFYVTCAGYFGVMFFLNIAMFIVVMVQICGRNGKRSNRTLREEVLRNLRSVVSLTFLLGMTWGFAFFAWGPLNIPFMYLFSIFNSLQGKINCT

SEQ ID NO: 27 - DNA, 1626 bp, Homo sapiens
  CDS (1)...(1626)
atggattttgagagtggacaagtggatccactggcatctgtaattttgcctccaaacttacttgagaatttaagtccagaagattctgtattagttagaagagcacagtttactttcttcaacaaaactggacttttccaggatgtaggaccccaaagaaaaactttagtgagttatgtgatggcgtgcagtattggaaacattactatccagaatctgaaggatcctgttcaaataaaaatcaaacatacaagaactcaggaagtgcatcatcccatctgtgccttctgggatctgaacaaaaacaaaagttttggaggatggaacacgtcaggatgtgttgcacacagagattcagatgcaagtgagacagtctgcctgtgtaaccacttcacacactttggagttctgatggaccttccaagaagtgcctcacagttagatgcaagaaacactaaagtcctcactttcatcagctatattgggtgtggaatatctgctattttttcagcagcaactctcctgacatatgttgcttttgagaaattgcgaagggattatccctccaaaatcttgatgaacctgagcacagccctgctgttcctgaatctcctcttcctcctagatggctggatcacctccttcaatgtggatggactttgcattgctgttgcagtcctgttgcatttcttccttctggcaacctttacctggatggggctagaagcaattcacatgtacattgctctagttaaagtatttaacacttacattcgccgatacattctaaaattctgcatcattggctggggtttgcctgccttagtggtgtcagttgttctagcgagcagaaacaacaatgaagtctatggaaaagaaagttatgggaaagaaaaaggtgatgaattctgttggattcaagatccagtcatattttatgtgacctgtgctgggtattttggagtcatgttttttctgaacattgccatgttcattgtggtaatggtgcagatctgtgggaggaatggcaagagaagcaaccggaccctgagagaagaagtgttaaggaacctgcgcagtgtggttagcttgacctttctgttgggcatgacatggggttttgcattctttgcctggggacccttaaatatccccttcatgtacctcttctccatcttcaattcattacaaggcttatttatattcatcttccactgtgctatgaaggagaatgttcagaaacagtggcggcggcatctctgctgtggtagatttcggttagcagataactcagattggagtaagacagctaccaatatcatcaagaaaagttctgataatctaggaaaatctttgtcttcaagctccattggttccaactcaacctatcttacatccaaatctaaatccagctctaccacctatttcaaaaggaatagccacacagacagtgcttccatggacaagtccttgtcaaaactggcccatgctgatggagatcaaacatcaatcatccctgtccatcaggtcattgataaggtcaagggttattgcaatgctcattcagacaacttctataaaaatattatcatgtcagacaccttcagccacagcacaaagttttaa

SEQ ID NO: 28 - protein, 541 aa, Homo sapiens
MDFESGQVDPLASVILPPNLLENLSPEDSVLVRRAQFTFFNKTGLFQDVGPQRKTLVSYVMACSIGNITIQNLKDPVQIKIKHTRTQEVHHPICAFWDLNKNKSFGGWNTSGCVAHRDSDASETVCLCNHFTHFGVLMDLPRSASQLDARNTKVLTFISYIGCGISAIFSAATLLTYVAFEKLRRDYPSKILMNLSTALLFLNLLFLLDGWITSFNVDGLCIAVAVLLHFFLLATFTWMGLEAIHMYIALVKVFNTYIRRYILKFCIIGWGLPALVVSVVLASRNNNEVYGKESYGKEKGDEFCWIQDPVIFYVTCAGYFGVMFFLNIAMFIVVMVQICGRNGKRSNRTLREEVLRNLRSVVSLTFLLGMTWGFAFFAWGPLNIPFMYLFSIFNSLQGLFIFIFHCAMKENVQKQWRRHLCCGRFRLADNSDWSKTATNIIKKSSDNLGKSLSSSSIGSNSTYLTSKSKSSSTTYFKRNSHTDSASMDKSLSKLAHADGDQTSIIPVHQVIDKVKGYCNAHSDNFYKNIIMSDTFSHSTKF

SEQ ID NO: 29 - DNA, 1539 bp, Homo sapiens
  CDS (1)...(1539)
atggattttgagagtggacaagtggatccactggcatctgtaattttgcctccaaacttacttgagaatttaagtccagaagattctgtattagttagaagagcacagtttactttcttcaacaaaactggacttttccaggatgtaggaccccaaagaaaaactttagtgagttatgtgatggcgtgcagtattggaaacattactatccagaatctgaaggatcctgttcaaataaaaatcaaacatacaagaactcaggaagtgcatcatcccatctgtgccttctgggatctgaacaaaaacaaaagttttggaggatggaacacgtcaggatgtgttgcacacagagattcagatgcaagtgagacagtctgcctgtgtaaccacttcacacactttggagttctgatggaccttccaagaagtgcctcacagttagatgcaagaaacactaaagtcctcactttcatcagctatattgggtgtggaatatctgctattttttcagcagcaactctcctgacatatgttgcttttgagaaattgcgaagggattatccctccaaaatcttgatgaacctgagcacagccctgctgttcctgaatctcctcttcctcctagatggctggatcacctccttcaatgtggatggactttgcattgctgttgcagtcctgttgcatttcttccttctggcaacctttacctggatggggctagaagcaattcacatgtacattgctctagttaaagtatttaacacttacattcgccgatacattctaaaattctgcatcattggctggggtttgcctgccttagtggtgtcagttgttctagcgagcagaaacaacaatgaagtctatggaaaagaaagttatgggaaagaaaaaggtgatgaattctgttggattcaagatccagtcatattttatgtgacctgtgctgggtattttggagtcatgttttttctgaacattgccatgttcattgtggtaatggtgcagatctgtgggaggaatggcaagagaagcaaccggaccctgagagaagaagtgttaaggaacctgcgcagtgtggttagcttgacctttctgttgggcatgacatggggttttgcattctttgcctggggacccttaaatatccccttcatgtacctcttctccatcttcaattcattacaaggcttatttatattcatcttccactgtgctatgaaggagaatgttcagaaacagtggcggcggcatctctgctgtggtagatttcggttagcagataactcagattggagtaagacagctaccaatatcatcaagaaaagttctgataatctaggaaaatctttgtcttcaagctccattggttccaactcaacctatcttacatccaaatctaaatccagctctaccacctatttcaaaaggaatagccacacagataatgtctcctatgagcattccttcaacaaaagtggatcactcagacagtgcttccatggacaagtccttgtcaaaactggcccatgctga

SEQ ID NO: 30 - protein, 512 aa, Homo sapiens
MDFESGQVDPLASVILPPNLLENLSPEDSVLVRRAQFTFFNKTGLFQDVGPQRKTLVSYVMACSIGNITIQNLKDPVQIKIKHTRTQEVHHPICAFWDLNKNKSFGGWNTSGCVAHRDSDASETVCLCNHFTHFGVLMDLPRSASQLDARNTKVLTFISYIGCGISAIFSAATLLTYVAFEKLRRDYPSKILMNLSTALLFLNLLFLLDGWITSFNVDGLCIAVAVLLHFFLLATFTWMGLEAIHMYIALVKVFNTYIRRYILKFCIIGWGLPALVVSVVLASRNNNEVYGKESYGKEKGDEFCWIQDPVIFYVTCAGYFGVMFFLNIAMFIVVMVQICGRNGKRSNRTLREEVLRNLRSVVSLTFLLGMTWGFAFFAWGPLNIPFMYLFSIFNSLQGLFIFIFHCAMKENVQKQWRRHLCCGRFRLADNSDWSKTATNIIKKSSDNLGKSLSSSSIGSNSTYLTSKSKSSSTTYFKRNSHTDNVSYEHSFNKSGSLRQCFHGQVLVKTGPC

SEQ ID NO: 31 - DNA, 27 bp, Homo sapiens
  CDS (1)...(27)
atgagccagtggtttctttcattttaa

SEQ ID NO: 32 - protein, 8 aa, Homo sapiens
MSQWFLSF

SEQ ID NO: 33 - DNA, 1212 bp, Homo sapiens
  CDS (1)...(1212)
atggattttgagagtggacaagtggatccactggcatctgtaattttgcctccaaacttacttgagaatttaagtccagaagattctgtattagttagaagagcacagtttactttcttcaacaaaactggacttttccaggatgtaggaccccaaagaaaaactttagtgagttatgtgatggcgtgcagtattggaaacattactatccagaatctgaaggatcctgttcaaataaaaatcaaacatacaagaactcaggaagtgcatcatcccatctgtgccttctgggatctgaacaaaaacaaaagttttggaggatggaacacgtcaggatgtgttgcacacagagattcagatgcaagtgagacagtctgcctgtgtaaccacttcacacactttggagttctgatggaccttccaagaagtgcctcacagttagatgcaagaaacactaaagtcctcactttcatcagctatattgggtgtggaatatctgctattttttcagcagcaactctcctgacatatgttgcttttgagaaattgcgaagggattatccctccaaaatcttgatgaacctgagcacagccctgctgttcctgaatctcctcttcctcctagatggctggatcacctccttcaatgtggatggactttgcattgctgttgcagtcctgttgcatttcttccttctggcaacctttacctggatggggctagaagcaattcacatgtacattgctctagttaaagtatttaacacttacattcgccgatacattctaaaattctgcatcattggctggggtttgcctgccttagtggtgtcagttgttctagcgagcagaaacaacaatgaagtctatggaaaagaaagttatgggaaagaaaaaggtgatgaattctgttggattcaagatccagtcatattttatgtgacctgtgctgggtattttggagtcatgttttttctgaacattgccatgttcattgtggtaatggtgcagatctgtgggaggaatggcaagagaagcaaccggaccctgagagaagaagtgttaaggaacctgcgcagtgtggttagcttgacctttctgttgggcatgacatggggttttgcattctttgcctggggacccttaaatatccccttcatgtacctcttctccatcttcaattcattacaaggtaagataaattgtacatga

SEQ ID NO: 34 - protein, 403 aa, Homo sapiens
MDFESGQVDPLASVILPPNLLENLSPEDSVLVRRAQFTFFNKTGLFQDVGPQRKTLVSYVMACSIGNITIQNLKDPVQIKIKHTRTQEVHHPICAFWDLNKNKSFGGWNTSGCVAHRDSDASETVCLCNHFTHFGVLMDLPRSASQLDARNTKVLTFISYIGCGISAIFSAATLLTYVAFEKLRRDYPSKILMNLSTALLFLNLLFLLDGWITSFNVDGLCIAVAVLLHFFLLATFTWMGLEAIHMYIALVKVFNTYIRRYILKFCIIGWGLPALVVSVVLASRNNNEVYGKESYGKEKGDEFCWIQDPVIFYVTCAGYFGVMFFLNIAMFIVVMVQICGRNGKRSNRTLREEVLRNLRSVVSLTFLLGMTWGFAFFAWGPLNIPFMYLFSIFNSLQGKINCT

SEQ ID NO: 35 - DNA, 3669 bp, Homo sapiens
  CDS (1)...(3669)
atgtttcgctcagatcgaatgtggagctgccattggaaatggaagcccagtcctctcctgttcttatttgctttatatatcatgtgtgttcctcactcagcagtgtggggatgtgccaactgccgagtggttttgtccaacccttctgggacctttacttctccatgctaccctaacgactacccaaacagccaggcttgcatgtggacgctccgagcccccaccggttatatcattcagataacatttaacgactttgacattgaagaagctcccaattgcatttatgactcattatcccttgataatggagagagccagactaaattttgtggagcaactgccaaaggcctatcatttaactcaagtgcgaatgagatgcatgtgtccttttcaagtgactttagcatccagaagaaaggtttcaatgccagctacatcagagttgccgtgtccttaaggaatcaaaaggtcattttaccccagacatcagatgcttaccaggtatctgttgcaaaaagcatctctattccagagctcagtgctttcacactctgctttgaagcaaccaaagttggccatgaagacagtgattggacagctttctcctactcaaatgcatccttcacacaattgctcagttttggaaaggccaagagtggctactttctatccatttctgattcaaaatgtttgttgaataatgcattacctgtcaaagaaaaagaagacatttttgcagaaagctttgaacagctctgccttgtttggaataattctttgggctctattggtgtaaatttcaaaagaaactatgaaacagttccatgtgattctaccattagtaaagttattcctgggaatgggaaattgttgttgggctccaatcaaaatgaaattgtctctctaaaaggggacatttataactttcgactttggaattttaccatgaatgccaaaatcctctccaacctcagctgtaatgtgaaagggaatgtagtcgactggcaaaatgacttctggaatatcccaaacctagctctgaaagctgaaagcaacctaagctgtggttcctacctgatcccgctcccagcagcagaactggccagctgtgcagacctggggaccctctgtcaagatggaattatctatagaatatccgtagtgattcagaacatccttcgtcaccctgaggtaaaagtacagagcaaggtggcagaatggctcaattcaaccttccaaaattggaactacacggtttatgtcgttaatatcagttttcacctgagtgctggagaggacaagattaaagtcaagagaagccttgaggatgagccaaggttggtgctttgggcccttctagtttacaatgctaccaacaatactaatttagaaggaaaaatcattcagcagaagctcctaaaaaataatgagtccttggatgaaggcttgaggctacatacagtgaatgtgagacaactgggtcattgtcttgccatggaggaacccaaaggctactactggccatctatccaaccttctgaatacgttcttccttgtccagacaagcctggcttttctgcttctcggatatgtttttacaatgctaccaacccattggtaacctactggggacctgttgatatctccaactgtttaaaagaagcaaatgaagttgctaaccagattttaaatttaactgctgatgggcagaacttaacctcagccaatattaccaacattgtggaacaggtcaaaagaattgtgaataaagaagaaaacattgatataacacttggctcaactctaatgaatatattttctaatatcttaagcagttcagacagtgacttgcttgagtcatcttctgaagctttaaaaacaattgatgaattggccttcaagatagacctaaatagcacatcacatgtgaatattacaactcggaacttggctctcagcgtatcatccctgttaccagggacaaatgcaatttcaaattttagcattggtcttccaagcaataatgaatcgtatttccagatggattttgagagtggacaagtggatccactggcatctgtaattttgcctccaaacttacttgagaatttaagtccagaagattctgtattagttagaagagcacagtttactttcttcaacaaaactggacttttccaggatgtaggaccccaaagaaaaactttagtgagttatgtgatggcgtgcagtattggaaacattactatccagaatctgaaggatcctgttcaaataaaaatcaaacatacaagaactcaggaagtgcatcatcccatctgtgccttctgggatctgaacaaaaacaaaagttttggaggatggaacacgtcaggatgtgttgcacacagagattcagatgcaagtgagacagtctgcctgtgtaaccacttcacacactttggagttctgatggaccttccaagaagtgcctcacagttagatgcaagaaacactaaagtcctcactttcatcagctatattgggtgtggaatatctgctattttttcagcagcaactctcctgacatatgttgcttttgagaaattgcgaagggattatccctccaaaatcttgatgaacctgagcacagccctgctgttcctgaatctcctcttcctcctagatggctggatcacctccttcaatgtggatggactttgcattgctgttgcagtcctgttgcatttcttccttctggcaacctttacctggatggggctagaagcaattcacatgtacattgctctagttaaagtatttaacacttacattcgccgatacattctaaaattctgcatcattggctggggtttgcctgccttagtggtgtcagttgttctagcgagcagaaacaacaatgaagtctatggaaaagaaagttatgggaaagaaaaaggtgatgaattctgttggattcaagatccagtcatattttatgtgacctgtgctgggtattttggagtcatgttttttctgaacattgccatgttcattgtggtaatggtgcagatctgtgggaggaatggcaagagaagcaaccggaccctgagagaagaagtgttaaggaacctgcgcagtgtggttagcttgacctttctgttgggcatgacatggggttttgcattctttgcctggggacccttaaatatccccttcatgtacctcttctccatcttcaattcattacaaggcttatttatattcatcttccactgtgctatgaaggagaatgttcagaaacagtggcggcggcatctctgctgtggtagatttcggttagcagataactcagattggagtaagacagctaccaatatcatcaagaaaagttctgataatctaggaaaatctttgtcttcaagctccattggttccaactcaacctatcttacatccaaatctaaatccagctctaccacctatttcaaaaggaatagccacacagacagtgcttccatggacaagtccttgtcaaaactggcccatgctgatggagatcaaacatcaatcatccctgtccatcaggtcattgataaggtcaagggttattgcaatgctcattcagacaacttctataaaaatattatcatgtcagacaccttcagccacagcacaaagttttaa

SEQ ID NO: 36 - protein, 1222 aa, Homo sapiens
MFRSDRMWSCHWKWKPSPLLFLFALYIMCVPHSAVWGCANCRVVLSNPSGTFTSPCYPNDYPNSQACMWTLRAPTGYIIQITFNDFDIEEAPNCIYDSLSLDNGESQTKFCGATAKGLSFNSSANEMHVSFSSDFSIQKKGFNASYIRVAVSLRNQKVILPQTSDAYQVSVAKSISIPELSAFTLCFEATKVGHEDSDWTAFSYSNASFTQLLSFGKAKSGYFLSISDSKCLLNNALPVKEKEDIFAESFEQLCLVWNNSLGSIGVNFKRNYETVPCDSTISKVIPGNGKLLLGSNQNEIVSLKGDIYNFRLWNFTMNAKILSNLSCNVKGNVVDWQNDFWNIPNLALKAESNLSCGSYLIPLPAAELASCADLGTLCQDGIIYRISVVIQNILRHPEVKVQSKVAEWLNSTFQNWNYTVYVVNISFHLSAGEDKIKVKRSLEDEPRLVLWALLVYNATNNTNLEGKIIQQKLLKNNESLDEGLRLHTVNVRQLGHCLAMEEPKGYYWPSIQPSEYVLPCPDKPGFSASRICFYNATNPLVTYWGPVDISNCLKEANEVANQILNLTADGQNLTSANITNIVEQVKRIVNKEENIDITLGSTLMNIFSNILSSSDSDLLESSSEALKTIDELAFKIDLNSTSHVNITTRNLALSVSSLLPGTNAISNFSIGLPSNNESYFQMDFESGQVDPLASVILPPNLLENLSPEDSVLVRRAQFTFFNKTGLFQDVGPQRKTLVSYVMACSIGNITIQNLKDPVQIKIKHTRTQEVHHPICAFWDLNKNKSFGGWNTSGCVAHRDSDASETVCLCNHFTHFGVLMDLPRSASQLDARNTKVLTFISYIGCGISAIFSAATLLTYVAFEKLRRDYPSKILMNLSTALLFLNLLFLLDGWITSFNVDGLCIAVAVLLHFFLLATFTWMGLEAIHMYIALVKVFNTYIRRYILKFCIIGWGLPALVVSVVLASRNNNEVYGKESYGKEKGDEFCWIQDPVIFYVTCAGYFGVMFFLNIAMFIVVMVQICGRNGKRSNRTLREEVLRNLRSVVSLTFLLGMTWGFAFFAWGPLNIPFMYLFSIFNSLQGLFIFIFHCAMKENVQKQWRRHLCCGRFRLADNSDWSKTATNIIKKSSDNLGKSLSSSSIGSNSTYLTSKSKSSSTTYFKRNSHTDSASMDKSLSKLAHADGDQTSIIPVHQVIDKVKGYCNAHSDNFYKNIIMSDTFSHSTKF

SEQ ID NO: 37 - DNA, 3582 bp, Homo sapiens
  CDS (1)...(3582)
atgtttcgctcagatcgaatgtggagctgccattggaaatggaagcccagtcctctcctgttcttatttgctttatatatcatgtgtgttcctcactcagcagtgtggggatgtgccaactgccgagtggttttgtccaacccttctgggacctttacttctccatgctaccctaacgactacccaaacagccaggcttgcatgtggacgctccgagcccccaccggttatatcattcagataacatttaacgactttgacattgaagaagctcccaattgcatttatgactcattatcccttgataatggagagagccagactaaattttgtggagcaactgccaaaggcctatcatttaactcaagtgcgaatgagatgcatgtgtccttttcaagtgactttagcatccagaagaaaggtttcaatgccagctacatcagagttgccgtgtccttaaggaatcaaaaggtcattttaccccagacatcagatgcttaccaggtatctgttgcaaaaagcatctctattccagagctcagtgctttcacactctgctttgaagcaaccaaagttggccatgaagacagtgattggacagctttctcctactcaaatgcatccttcacacaattgctcagttttggaaaggccaagagtggctactttctatccatttctgattcaaaatgtttgttgaataatgcattacctgtcaaagaaaaagaagacatttttgcagaaagctttgaacagctctgccttgtttggaataattctttgggctctattggtgtaaatttcaaaagaaactatgaaacagttccatgtgattctaccattagtaaagttattcctgggaatgggaaattgttgttgggctccaatcaaaatgaaattgtctctctaaaaggggacatttataactttcgactttggaattttaccatgaatgccaaaatcctctccaacctcagctgtaatgtgaaagggaatgtagtcgactggcaaaatgacttctggaatatcccaaacctagctctgaaagctgaaagcaacctaagctgtggttcctacctgatcccgctcccagcagcagaactggccagctgtgcagacctggggaccctctgtcaagatggaattatctatagaatatccgtagtgattcagaacatccttcgtcaccctgaggtaaaagtacagagcaaggtggcagaatggctcaattcaaccttccaaaattggaactacacggtttatgtcgttaatatcagttttcacctgagtgctggagaggacaagattaaagtcaagagaagccttgaggatgagccaaggttggtgctttgggcccttctagtttacaatgctaccaacaatactaatttagaaggaaaaatcattcagcagaagctcctaaaaaataatgagtccttggatgaaggcttgaggctacatacagtgaatgtgagacaactgggtcattgtcttgccatggaggaacccaaaggctactactggccatctatccaaccttctgaatacgttcttccttgtccagacaagcctggcttttctgcttctcggatatgtttttacaatgctaccaacccattggtaacctactggggacctgttgatatctccaactgtttaaaagaagcaaatgaagttgctaaccagattttaaatttaactgctgatgggcagaacttaacctcagccaatattaccaacattgtggaacaggtcaaaagaattgtgaataaagaagaaaacattgatataacacttggctcaactctaatgaatatattttctaatatcttaagcagttcagacagtgacttgcttgagtcatcttctgaagctttaaaaacaattgatgaattggccttcaagatagacctaaatagcacatcacatgtgaatattacaactcggaacttggctctcagcgtatcatccctgttaccagggacaaatgcaatttcaaattttagcattggtcttccaagcaataatgaatcgtatttccagatggattttgagagtggacaagtggatccactggcatctgtaattttgcctccaaacttacttgagaatttaagtccagaagattctgtattagttagaagagcacagtttactttcttcaacaaaactggacttttccaggatgtaggaccccaaagaaaaactttagtgagttatgtgatggcgtgcagtattggaaacattactatccagaatctgaaggatcctgttcaaataaaaatcaaacatacaagaactcaggaagtgcatcatcccatctgtgccttctgggatctgaacaaaaacaaaagttttggaggatggaacacgtcaggatgtgttgcacacagagattcagatgcaagtgagacagtctgcctgtgtaaccacttcacacactttggagttctgatggaccttccaagaagtgcctcacagttagatgcaagaaacactaaagtcctcactttcatcagctatattgggtgtggaatatctgctattttttcagcagcaactctcctgacatatgttgcttttgagaaattgcgaagggattatccctccaaaatcttgatgaacctgagcacagccctgctgttcctgaatctcctcttcctcctagatggctggatcacctccttcaatgtggatggactttgcattgctgttgcagtcctgttgcatttcttccttctggcaacctttacctggatggggctagaagcaattcacatgtacattgctctagttaaagtatttaacacttacattcgccgatacattctaaaattctgcatcattggctggggtttgcctgccttagtggtgtcagttgttctagcgagcagaaacaacaatgaagtctatggaaaagaaagttatgggaaagaaaaaggtgatgaattctgttggattcaagatccagtcatattttatgtgacctgtgctgggtattttggagtcatgttttttctgaacattgccatgttcattgtggtaatggtgcagatctgtgggaggaatggcaagagaagcaaccggaccctgagagaagaagtgttaaggaacctgcgcagtgtggttagcttgacctttctgttgggcatgacatggggttttgcattctttgcctggggacccttaaatatccccttcatgtacctcttctccatcttcaattcattacaaggcttatttatattcatcttccactgtgctatgaaggagaatgttcagaaacagtggcggcggcatctctgctgtggtagatttcggttagcagataactcagattggagtaagacagctaccaatatcatcaagaaaagttctgataatctaggaaaatctttgtcttcaagctccattggttccaactcaacctatcttacatccaaatctaaatccagctctaccacctatttcaaaaggaatagccacacagataatgtctcctatgagcattccttcaacaaaagtggatcactcagacagtgcttccatggacaagtccttgtcaaaactggcccatgctga

SEQ ID NO: 38 - protein, 1193 aa, Homo sapiens
MFRSDRMWSCHWKWKPSPLLFLFALYIMCVPHSAVWGCANCRVVLSNPSGTFTSPCYPNDYPNSQACMWTLRAPTGYIIQITFNDFDIEEAPNCIYDSLSLDNGESQTKFCGATAKGLSFNSSANEMHVSFSSDFSIQKKGFNASYIRVAVSLRNQKVILPQTSDAYQVSVAKSISIPELSAFTLCFEATKVGHEDSDWTAFSYSNASFTQLLSFGKAKSGYFLSISDSKCLLNNALPVKEKEDIFAESFEQLCLVWNNSLGSIGVNFKRNYETVPCDSTISKVIPGNGKLLLGSNQNEIVSLKGDIYNFRLWNFTMNAKILSNLSCNVKGNVVDWQNDFWNIPNLALKAESNLSCGSYLIPLPAAELASCADLGTLCQDGIIYRISVVIQNILRHPEVKVQSKVAEWLNSTFQNWNYTVYVVNISFHLSAGEDKIKVKRSLEDEPRLVLWALLVYNATNNTNLEGKIIQQKLLKNNESLDEGLRLHTVNVRQLGHCLAMEEPKGYYWPSIQPSEYVLPCPDKPGFSASRICFYNATNPLVTYWGPVDISNCLKEANEVANQILNLTADGQNLTSANITNIVEQVKRIVNKEENIDITLGSTLMNIFSNILSSSDSDLLESSSEALKTIDELAFKIDLNSTSHVNITTRNLALSVSSLLPGTNAISNFSIGLPSNNESYFQMDFESGQVDPLASVILPPNLLENLSPEDSVLVRRAQFTFFNKTGLFQDVGPQRKTLVSYVMACSIGNITIQNLKDPVQIKIKHTRTQEVHHPICAFWDLNKNKSFGGWNTSGCVAHRDSDASETVCLCNHFTHFGVLMDLPRSASQLDARNTKVLTFISYIGCGISAIFSAATLLTYVAFEKLRRDYPSKILMNLSTALLFLNLLFLLDGWITSFNVDGLCIAVAVLLHFFLLATFTWMGLEAIHMYIALVKVFNTYIRRYILKFCIIGWGLPALVVSVVLASRNNNEVYGKESYGKEKGDEFCWIQDPVIFYVTCAGYFGVMFFLNIAMFIVVMVQICGRNGKRSNRTLREEVLRNLRSVVSLTFLLGMTWGFAFFAWGPLNIPFMYLFSIFNSLQGLFIFIFHCAMKENVQKQWRRHLCCGRFRLADNSDWSKTATNIIKKSSDNLGKSLSSSSIGSNSTYLTSKSKSSSTTYFKRNSHTDNVSYEHSFNKSGSLRQCFHGQVLVKTGPC

SEQ ID NO: 39 - DNA, 2073 bp, Homo sapiens
  CDS (1)...(2073)
atgtttcgctcagatcgaatgtggagctgccattggaaatggaagcccagtcctctcctgttcttatttgctttatatatcatgtgtgttcctcactcagcagtgtggggatgtgccaactgccgagtggttttgtccaacccttctgggacctttacttctccatgctaccctaacgactacccaaacagccaggcttgcatgtggacgctccgagcccccaccggttatatcattcagataacatttaacgactttgacattgaagaagctcccaattgcatttatgactcattatcccttgataatggagagagccagactaaattttgtggagcaactgccaaaggcctatcatttaactcaagtgcgaatgagatgcatgtgtccttttcaagtgactttagcatccagaagaaaggtttcaatgccagctacatcagagttgccgtgtccttaaggaatcaaaaggtcattttaccccagacatcagatgcttaccaggtatctgttgcaaaaagcatctctattccagagctcagtgctttcacactctgctttgaagcaaccaaagttggccatgaagacagtgattggacagctttctcctactcaaatgcatccttcacacaattgctcagttttggaaaggccaagagtggctactttctatccatttctgattcaaaatgtttgttgaataatgcattacctgtcaaagaaaaagaagacatttttgcagaaagctttgaacagctctgccttgtttggaataattctttgggctctattggtgtaaatttcaaaagaaactatgaaacagttccatgtgattctaccattagtaaagttattcctgggaatgggaaattgttgttgggctccaatcaaaatgaaattgtctctctaaaaggggacatttataactttcgactttggaattttaccatgaatgccaaaatcctctccaacctcagctgtaatgtgaaagggaatgtagtcgactggcaaaatgacttctggaatatcccaaacctagctctgaaagctgaaagcaacctaagctgtggttcctacctgatcccgctcccagcagcagaactggccagctgtgcagacctggggaccctctgtcaagatggaattatctatagaatatccgtagtgattcagaacatccttcgtcaccctgaggtaaaagtacagagcaaggtggcagaatggctcaattcaaccttccaaaattggaactacacggtttatgtcgttaatatcagttttcacctgagtgctggagaggacaagattaaagtcaagagaagccttgaggatgagccaaggttggtgctttgggcccttctagtttacaatgctaccaacaatactaatttagaaggaaaaatcattcagcagaagctcctaaaaaataatgagtccttggatgaaggcttgaggctacatacagtgaatgtgagacaactgggtcattgtcttgccatggaggaacccaaaggctactactggccatctatccaaccttctgaatacgttcttccttgtccagacaagcctggcttttctgcttctcggatatgtttttacaatgctaccaacccattggtaacctactggggacctgttgatatctccaactgtttaaaagaagcaaatgaagttgctaaccagattttaaatttaactgctgatgggcagaacttaacctcagccaatattaccaacattgtggaacaggtcaaaagaattgtgaataaagaagaaaacattgatataacacttggctcaactctaatgaatatattttctaatatcttaagcagttcagacagtgacttgcttgagtcatcttctgaagctttaaaaacaattgatgaattggccttcaagatagacctaaatagcacatcacatgtgaatattacaactcggaacttggctctcagcgtatcatccctgttaccagggacaaatgcaatttcaaattttagcattggtcttccaagcaataatgaatcgtatttccaggtaatgagccagtggtttctttcattttaa

SEQ ID NO: 40 - protein, 690 aa, Homo sapiens
MFRSDRMWSCHWKWKPSPLLFLFALYIMCVPHSAVWGCANCRVVLSNPSGTFTSPCYPNDYPNSQACMWTLRAPTGYIIQITFNDFDIEEAPNCIYDSLSLDNGESQTKFCGATAKGLSFNSSANEMHVSFSSDFSIQKKGFNASYIRVAVSLRNQKVILPQTSDAYQVSVAKSISIPELSAFTLCFEATKVGHEDSDWTAFSYSNASFTQLLSFGKAKSGYFLSISDSKCLLNNALPVKEKEDIFAESFEQLCLVWNNSLGSIGVNFKRNYETVPCDSTISKVIPGNGKLLLGSNQNEIVSLKGDIYNFRLWNFTMNAKILSNLSCNVKGNVVDWQNDFWNIPNLALKAESNLSCGSYLIPLPAAELASCADLGTLCQDGIIYRISVVIQNILRHPEVKVQSKVAEWLNSTFQNWNYTVYVVNISFHLSAGEDKIKVKRSLEDEPRLVLWALLVYNATNNTNLEGKIIQQKLLKNNESLDEGLRLHTVNVRQLGHCLAMEEPKGYYWPSIQPSEYVLPCPDKPGFSASRICFYNATNPLVTYWGPVDISNCLKEANEVANQILNLTADGQNLTSANITNIVEQVKRIVNKEENIDITLGSTLMNIFSNILSSSDSDLLESSSEALKTIDELAFKIDLNSTSHVNITTRNLALSVSSLLPGTNAISNFSIGLPSNNESYFQVMSQWFLSF

SEQ ID NO: 41 - DNA, 3255 bp, Homo sapiens
  CDS (1)...(3255)
atgtttcgctcagatcgaatgtggagctgccattggaaatggaagcccagtcctctcctgttcttatttgctttatatatcatgtgtgttcctcactcagcagtgtggggatgtgccaactgccgagtggttttgtccaacccttctgggacctttacttctccatgctaccctaacgactacccaaacagccaggcttgcatgtggacgctccgagcccccaccggttatatcattcagataacatttaacgactttgacattgaagaagctcccaattgcatttatgactcattatcccttgataatggagagagccagactaaattttgtggagcaactgccaaaggcctatcatttaactcaagtgcgaatgagatgcatgtgtccttttcaagtgactttagcatccagaagaaaggtttcaatgccagctacatcagagttgccgtgtccttaaggaatcaaaaggtcattttaccccagacatcagatgcttaccaggtatctgttgcaaaaagcatctctattccagagctcagtgctttcacactctgctttgaagcaaccaaagttggccatgaagacagtgattggacagctttctcctactcaaatgcatccttcacacaattgctcagttttggaaaggccaagagtggctactttctatccatttctgattcaaaatgtttgttgaataatgcattacctgtcaaagaaaaagaagacatttttgcagaaagctttgaacagctctgccttgtttggaataattctttgggctctattggtgtaaatttcaaaagaaactatgaaacagttccatgtgattctaccattagtaaagttattcctgggaatgggaaattgttgttgggctccaatcaaaatgaaattgtctctctaaaaggggacatttataactttcgactttggaattttaccatgaatgccaaaatcctctccaacctcagctgtaatgtgaaagggaatgtagtcgactggcaaaatgacttctggaatatcccaaacctagctctgaaagctgaaagcaacctaagctgtggttcctacctgatcccgctcccagcagcagaactggccagctgtgcagacctggggaccctctgtcaagatggaattatctatagaatatccgtagtgattcagaacatccttcgtcaccctgaggtaaaagtacagagcaaggtggcagaatggctcaattcaaccttccaaaattggaactacacggtttatgtcgttaatatcagttttcacctgagtgctggagaggacaagattaaagtcaagagaagccttgaggatgagccaaggttggtgctttgggcccttctagtttacaatgctaccaacaatactaatttagaaggaaaaatcattcagcagaagctcctaaaaaataatgagtccttggatgaaggcttgaggctacatacagtgaatgtgagacaactgggtcattgtcttgccatggaggaacccaaaggctactactggccatctatccaaccttctgaatacgttcttccttgtccagacaagcctggcttttctgcttctcggatatgtttttacaatgctaccaacccattggtaacctactggggacctgttgatatctccaactgtttaaaagaagcaaatgaagttgctaaccagattttaaatttaactgctgatgggcagaacttaacctcagccaatattaccaacattgtggaacaggtcaaaagaattgtgaataaagaagaaaacattgatataacacttggctcaactctaatgaatatattttctaatatcttaagcagttcagacagtgacttgcttgagtcatcttctgaagctttaaaaacaattgatgaattggccttcaagatagacctaaatagcacatcacatgtgaatattacaactcggaacttggctctcagcgtatcatccctgttaccagggacaaatgcaatttcaaattttagcattggtcttccaagcaataatgaatcgtatttccagatggattttgagagtggacaagtggatccactggcatctgtaattttgcctccaaacttacttgagaatttaagtccagaagattctgtattagttagaagagcacagtttactttcttcaacaaaactggacttttccaggatgtaggaccccaaagaaaaactttagtgagttatgtgatggcgtgcagtattggaaacattactatccagaatctgaaggatcctgttcaaataaaaatcaaacatacaagaactcaggaagtgcatcatcccatctgtgccttctgggatctgaacaaaaacaaaagttttggaggatggaacacgtcaggatgtgttgcacacagagattcagatgcaagtgagacagtctgcctgtgtaaccacttcacacactttggagttctgatggaccttccaagaagtgcctcacagttagatgcaagaaacactaaagtcctcactttcatcagctatattgggtgtggaatatctgctattttttcagcagcaactctcctgacatatgttgcttttgagaaattgcgaagggattatccctccaaaatcttgatgaacctgagcacagccctgctgttcctgaatctcctcttcctcctagatggctggatcacctccttcaatgtggatggactttgcattgctgttgcagtcctgttgcatttcttccttctggcaacctttacctggatggggctagaagcaattcacatgtacattgctctagttaaagtatttaacacttacattcgccgatacattctaaaattctgcatcattggctggggtttgcctgccttagtggtgtcagttgttctagcgagcagaaacaacaatgaagtctatggaaaagaaagttatgggaaagaaaaaggtgatgaattctgttggattcaagatccagtcatattttatgtgacctgtgctgggtattttggagtcatgttttttctgaacattgccatgttcattgtggtaatggtgcagatctgtgggaggaatggcaagagaagcaaccggaccctgagagaagaagtgttaaggaacctgcgcagtgtggttagcttgacctttctgttgggcatgacatggggttttgcattctttgcctggggacccttaaatatccccttcatgtacctcttctccatcttcaattcattacaaggtaagataaattgtacatga

SEQ ID NO: 42 - protein, 1084 aa, Homo sapiens
MFRSDRMWSCHWKWKPSPLLFLFALYIMCVPHSAVWGCANCRVVLSNPSGTFTSPCYPNDYPNSQACMWTLRAPTGYIIQITFNDFDIEEAPNCIYDSLSLDNGESQTKFCGATAKGLSFNSSANEMHVSFSSDFSIQKKGFNASYIRVAVSLRNQKVILPQTSDAYQVSVAKSISIPELSAFTLCFEATKVGHEDSDWTAFSYSNASFTQLLSFGKAKSGYFLSISDSKCLLNNALPVKEKEDIFAESFEQLCLVWNNSLGSIGVNFKRNYETVPCDSTISKVIPGNGKLLLGSNQNEIVSLKGDIYNFRLWNFTMNAKILSNLSCNVKGNVVDWQNDFWNIPNLALKAESNLSCGSYLIPLPAAELASCADLGTLCQDGIIYRISVVIQNILRHPEVKVQSKVAEWLNSTFQNWNYTVYVVNISFHLSAGEDKIKVKRSLEDEPRLVLWALLVYNATNNTNLEGKIIQQKLLKNNESLDEGLRLHTVNVRQLGHCLAMEEPKGYYWPSIQPSEYVLPCPDKPGFSASRICFYNATNPLVTYWGPVDISNCLKEANEVANQILNLTADGQNLTSANITNIVEQVKRIVNKEENIDITLGSTLMNIFSNILSSSDSDLLESSSEALKTIDELAFKIDLNSTSHVNITTRNLALSVSSLLPGTNAISNFSIGLPSNNESYFQMDFESGQVDPLASVILPPNLLENLSPEDSVLVRRAQFTFFNKTGLFQDVGPQRKTLVSYVMACSIGNITIQNLKDPVQIKIKHTRTQEVHHPICAFWDLNKNKSFGGWNTSGCVAHRDSDASETVCLCNHFTHFGVLMDLPRSASQLDARNTKVLTFISYIGCGISAIFSAATLLTYVAFEKLRRDYPSKILMNLSTALLFLNLLFLLDGWITSFNVDGLCIAVAVLLHFFLLATFTWMGLEAIHMYIALVKVFNTYIRRYILKFCIIGWGLPALVVSVVLASRNNNEVYGKESYGKEKGDEFCWIQDPVIFYVTCAGYFGVMFFLNIAMFIVVMVQICGRNGKRSNRTLREEVLRNLRSVVSLTFLLGMTWGFAFFAWGPLNIPFMYLFSIFNSLQGKINCT

SEQ ID NO: 43 - DNA, 3666 bp, Homo sapiens
  CDS (1)...(3666)
atgtttcgctcagatcgaatgtggagctgccattggaaatggaagcccagtcctctcctgttcttatttgctttatatatcatgtgtgttcctcactcagtgtggggatgtgccaactgccgagtggttttgtccaacccttctgggacctttacttctccatgctaccctaacgactacccaaacagccaggcttgcatgtggacgctccgagcccccaccggttatatcattcagataacatttaacgactttgacattgaagaagctcccaattgcatttatgactcattatcccttgataatggagagagccagactaaattttgtggagcaactgccaaaggcctatcatttaactcaagtgcgaatgagatgcatgtgtccttttcaagtgactttagcatccagaagaaaggtttcaatgccagctacatcagagttgccgtgtccttaaggaatcaaaaggtcattttaccccagacatcagatgcttaccaggtatctgttgcaaaaagcatctctattccagagctcagtgctttcacactctgctttgaagcaaccaaagttggccatgaagacagtgattggacagctttctcctactcaaatgcatccttcacacaattgctcagttttggaaaggccaagagtggctactttctatccatttctgattcaaaatgtttgttgaataatgcattacctgtcaaagaaaaagaagacatttttgcagaaagctttgaacagctctgccttgtttggaataattctttgggctctattggtgtaaatttcaaaagaaactatgaaacagttccatgtgattctaccattagtaaagttattcctgggaatgggaaattgttgttgggctccaatcaaaatgaaattgtctctctaaaaggggacatttataactttcgactttggaattttaccatgaatgccaaaatcctctccaacctcagctgtaatgtgaaagggaatgtagtcgactggcaaaatgacttctggaatatcccaaacctagctctgaaagctgaaagcaacctaagctgtggttcctacctgatcccgctcccagcagcagaactggccagctgtgcagacctggggaccctctgtcaagatggaattatctatagaatatccgtagtgattcagaacatccttcgtcaccctgaggtaaaagtacagagcaaggtggcagaatggctcaattcaaccttccaaaattggaactacacggtttatgtcgttaatatcagttttcacctgagtgctggagaggacaagattaaagtcaagagaagccttgaggatgagccaaggttggtgctttgggcccttctagtttacaatgctaccaacaatactaatttagaaggaaaaatcattcagcagaagctcctaaaaaataatgagtccttggatgaaggcttgaggctacatacagtgaatgtgagacaactgggtcattgtcttgccatggaggaacccaaaggctactactggccatctatccaaccttctgaatacgttcttccttgtccagacaagcctggcttttctgcttctcggatatgtttttacaatgctaccaacccattggtaacctactggggacctgttgatatctccaactgtttaaaagaagcaaatgaagttgctaaccagattttaaatttaactgctgatgggcagaacttaacctcagccaatattaccaacattgtggaacaggtcaaaagaattgtgaataaagaagaaaacattgatataacacttggctcaactctaatgaatatattttctaatatcttaagcagttcagacagtgacttgcttgagtcatcttctgaagctttaaaaacaattgatgaattggccttcaagatagacctaaatagcacatcacatgtgaatattacaactcggaacttggctctcagcgtatcatccctgttaccagggacaaatgcaatttcaaattttagcattggtcttccaagcaataatgaatcgtatttccagatggattttgagagtggacaagtggatccactggcatctgtaattttgcctccaaacttacttgagaatttaagtccagaagattctgtattagttagaagagcacagtttactttcttcaacaaaactggacttttccaggatgtaggaccccaaagaaaaactttagtgagttatgtgatggcgtgcagtattggaaacattactatccagaatctgaaggatcctgttcaaataaaaatcaaacatacaagaactcaggaagtgcatcatcccatctgtgccttctgggatctgaacaaaaacaaaagttttggaggatggaacacgtcaggatgtgttgcacacagagattcagatgcaagtgagacagtctgcctgtgtaaccacttcacacactttggagttctgatggaccttccaagaagtgcctcacagttagatgcaagaaacactaaagtcctcactttcatcagctatattgggtgtggaatatctgctattttttcagcagcaactctcctgacatatgttgcttttgagaaattgcgaagggattatccctccaaaatcttgatgaacctgagcacagccctgctgttcctgaatctcctcttcctcctagatggctggatcacctccttcaatgtggatggactttgcattgctgttgcagtcctgttgcatttcttccttctggcaacctttacctggatggggctagaagcaattcacatgtacattgctctagttaaagtatttaacacttacattcgccgatacattctaaaattctgcatcattggctggggtttgcctgccttagtggtgtcagttgttctagcgagcagaaacaacaatgaagtctatggaaaagaaagttatgggaaagaaaaaggtgatgaattctgttggattcaagatccagtcatattttatgtgacctgtgctgggtattttggagtcatgttttttctgaacattgccatgttcattgtggtaatggtgcagatctgtgggaggaatggcaagagaagcaaccggaccctgagagaagaagtgttaaggaacctgcgcagtgtggttagcttgacctttctgttgggcatgacatggggttttgcattctttgcctggggacccttaaatatccccttcatgtacctcttctccatcttcaattcattacaaggcttatttatattcatcttccactgtgctatgaaggagaatgttcagaaacagtggcggcggcatctctgctgtggtagatttcggttagcagataactcagattggagtaagacagctaccaatatcatcaagaaaagttctgataatctaggaaaatctttgtcttcaagctccattggttccaactcaacctatcttacatccaaatctaaatccagctctaccacctatttcaaaaggaatagccacacagacagtgcttccatggacaagtccttgtcaaaactggcccatgctgatggagatcaaacatcaatcatccctgtccatcaggtcattgataaggtcaagggttattgcaatgctcattcagacaacttctataaaaatattatcatgtcagacaccttcagccacagcacaaagttttaa

SEQ ID NO: 44 - protein, 1221 aa, Homo sapiens
MFRSDRMWSCHWKWKPSPLLFLFALYIMCVPHSVWGCANCRVVLSNPSGTFTSPCYPNDYPNSQACMWTLRAPTGYIIQITFNDFDIEEAPNCIYDSLSLDNGESQTKFCGATAKGLSFNSSANEMHVSFSSDFSIQKKGFNASYIRVAVSLRNQKVILPQTSDAYQVSVAKSISIPELSAFTLCFEATKVGHEDSDWTAFSYSNASFTQLLSFGKAKSGYFLSISDSKCLLNNALPVKEKEDIFAESFEQLCLVWNNSLGSIGVNFKRNYETVPCDSTISKVIPGNGKLLLGSNQNEIVSLKGDIYNFRLWNFTMNAKILSNLSCNVKGNVVDWQNDFWNIPNLALKAESNLSCGSYLIPLPAAELASCADLGTLCQDGIIYRISVVIQNILRHPEVKVQSKVAEWLNSTFQNWNYTVYVVNISFHLSAGEDKIKVKRSLEDEPRLVLWALLVYNATNNTNLEGKIIQQKLLKNNESLDEGLRLHTVNVRQLGHCLAMEEPKGYYWPSIQPSEYVLPCPDKPGFSASRICFYNATNPLVTYWGPVDISNCLKEANEVANQILNLTADGQNLTSANITNIVEQVKRIVNKEENIDITLGSTLMNIFSNILSSSDSDLLESSSEALKTIDELAFKIDLNSTSHVNITTRNLALSVSSLLPGTNAISNFSIGLPSNNESYFQMDFESGQVDPLASVILPPNLLENLSPEDSVLVRRAQFTFFNKTGLFQDVGPQRKTLVSYVMACSIGNITIQNLKDPVQIKIKHTRTQEVHHPICAFWDLNKNKSFGGWNTSGCVAHRDSDASETVCLCNHFTHFGVLMDLPRSASQLDARNTKVLTFISYIGCGISAIFSAATLLTYVAFEKLRRDYPSKILMNLSTALLFLNLLFLLDGWITSFNVDGLCIAVAVLLHFFLLATFTWMGLEAIHMYIALVKVFNTYIRRYILKFCIIGWGLPALVVSVVLASRNNNEVYGKESYGKEKGDEFCWIQDPVIFYVTCAGYFGVMFFLNIAMFIVVMVQICGRNGKRSNRTLREEVLRNLRSVVSLTFLLGMTWGFAFFAWGPLNIPFMYLFSIFNSLQGLFIFIFHCAMKENVQKQWRRHLCCGRFRLADNSDWSKTATNIIKKSSDNLGKSLSSSSIGSNSTYLTSKSKSSSTTYFKRNSHTDSASMDKSLSKLAHADGDQTSIIPVHQVIDKVKGYCNAHSDNFYKNIIMSDTFSHSTKF

SEQ ID NO: 45 - DNA, 3579 bp, Homo sapiens
  CDS (1)...(3579)
atgtttcgctcagatcgaatgtggagctgccattggaaatggaagcccagtcctctcctgttcttatttgctttatatatcatgtgtgttcctcactcagtgtggggatgtgccaactgccgagtggttttgtccaacccttctgggacctttacttctccatgctaccctaacgactacccaaacagccaggcttgcatgtggacgctccgagcccccaccggttatatcattcagataacatttaacgactttgacattgaagaagctcccaattgcatttatgactcattatcccttgataatggagagagccagactaaattttgtggagcaactgccaaaggcctatcatttaactcaagtgcgaatgagatgcatgtgtccttttcaagtgactttagcatccagaagaaaggtttcaatgccagctacatcagagttgccgtgtccttaaggaatcaaaaggtcattttaccccagacatcagatgcttaccaggtatctgttgcaaaaagcatctctattccagagctcagtgctttcacactctgctttgaagcaaccaaagttggccatgaagacagtgattggacagctttctcctactcaaatgcatccttcacacaattgctcagttttggaaaggccaagagtggctactttctatccatttctgattcaaaatgtttgttgaataatgcattacctgtcaaagaaaaagaagacatttttgcagaaagctttgaacagctctgccttgtttggaataattctttgggctctattggtgtaaatttcaaaagaaactatgaaacagttccatgtgattctaccattagtaaagttattcctgggaatgggaaattgttgttgggctccaatcaaaatgaaattgtctctctaaaaggggacatttataactttcgactttggaattttaccatgaatgccaaaatcctctccaacctcagctgtaatgtgaaagggaatgtagtcgactggcaaaatgacttctggaatatcccaaacctagctctgaaagctgaaagcaacctaagctgtggttcctacctgatcccgctcccagcagcagaactggccagctgtgcagacctggggaccctctgtcaagatggaattatctatagaatatccgtagtgattcagaacatccttcgtcaccctgaggtaaaagtacagagcaaggtggcagaatggctcaattcaaccttccaaaattggaactacacggtttatgtcgttaatatcagttttcacctgagtgctggagaggacaagattaaagtcaagagaagccttgaggatgagccaaggttggtgctttgggcccttctagtttacaatgctaccaacaatactaatttagaaggaaaaatcattcagcagaagctcctaaaaaataatgagtccttggatgaaggcttgaggctacatacagtgaatgtgagacaactgggtcattgtcttgccatggaggaacccaaaggctactactggccatctatccaaccttctgaatacgttcttccttgtccagacaagcctggcttttctgcttctcggatatgtttttacaatgctaccaacccattggtaacctactggggacctgttgatatctccaactgtttaaaagaagcaaatgaagttgctaaccagattttaaatttaactgctgatgggcagaacttaacctcagccaatattaccaacattgtggaacaggtcaaaagaattgtgaataaagaagaaaacattgatataacacttggctcaactctaatgaatatattttctaatatcttaagcagttcagacagtgacttgcttgagtcatcttctgaagctttaaaaacaattgatgaattggccttcaagatagacctaaatagcacatcacatgtgaatattacaactcggaacttggctctcagcgtatcatccctgttaccagggacaaatgcaatttcaaattttagcattggtcttccaagcaataatgaatcgtatttccagatggattttgagagtggacaagtggatccactggcatctgtaattttgcctccaaacttacttgagaatttaagtccagaagattctgtattagttagaagagcacagtttactttcttcaacaaaactggacttttccaggatgtaggaccccaaagaaaaactttagtgagttatgtgatggcgtgcagtattggaaacattactatccagaatctgaaggatcctgttcaaataaaaatcaaacatacaagaactcaggaagtgcatcatcccatctgtgccttctgggatctgaacaaaaacaaaagttttggaggatggaacacgtcaggatgtgttgcacacagagattcagatgcaagtgagacagtctgcctgtgtaaccacttcacacactttggagttctgatggaccttccaagaagtgcctcacagttagatgcaagaaacactaaagtcctcactttcatcagctatattgggtgtggaatatctgctattttttcagcagcaactctcctgacatatgttgcttttgagaaattgcgaagggattatccctccaaaatcttgatgaacctgagcacagccctgctgttcctgaatctcctcttcctcctagatggctggatcacctccttcaatgtggatggactttgcattgctgttgcagtcctgttgcatttcttccttctggcaacctttacctggatggggctagaagcaattcacatgtacattgctctagttaaagtatttaacacttacattcgccgatacattctaaaattctgcatcattggctggggtttgcctgccttagtggtgtcagttgttctagcgagcagaaacaacaatgaagtctatggaaaagaaagttatgggaaagaaaaaggtgatgaattctgttggattcaagatccagtcatattttatgtgacctgtgctgggtattttggagtcatgttttttctgaacattgccatgttcattgtggtaatggtgcagatctgtgggaggaatggcaagagaagcaaccggaccctgagagaagaagtgttaaggaacctgcgcagtgtggttagcttgacctttctgttgggcatgacatggggttttgcattctttgcctggggacccttaaatatccccttcatgtacctcttctccatcttcaattcattacaaggcttatttatattcatcttccactgtgctatgaaggagaatgttcagaaacagtggcggcggcatctctgctgtggtagatttcggttagcagataactcagattggagtaagacagctaccaatatcatcaagaaaagttctgataatctaggaaaatctttgtcttcaagctccattggttccaactcaacctatcttacatccaaatctaaatccagctctaccacctatttcaaaaggaatagccacacagataatgtctcctatgagcattccttcaacaaaagtggatcactcagacagtgcttccatggacaagtccttgtcaaaactggcccatgctga

SEQ ID NO: 46 - protein, 1192 aa, Homo sapiens
MFRSDRMWSCHWKWKPSPLLFLFALYIMCVPHSVWGCANCRVVLSNPSGTFTSPCYPNDYPNSQACMWTLRAPTGYIIQITFNDFDIEEAPNCIYDSLSLDNGESQTKFCGATAKGLSFNSSANEMHVSFSSDFSIQKKGFNASYIRVAVSLRNQKVILPQTSDAYQVSVAKSISIPELSAFTLCFEATKVGHEDSDWTAFSYSNASFTQLLSFGKAKSGYFLSISDSKCLLNNALPVKEKEDIFAESFEQLCLVWNNSLGSIGVNFKRNYETVPCDSTISKVIPGNGKLLLGSNQNEIVSLKGDIYNFRLWNFTMNAKILSNLSCNVKGNVVDWQNDFWNIPNLALKAESNLSCGSYLIPLPAAELASCADLGTLCQDGIIYRISVVIQNILRHPEVKVQSKVAEWLNSTFQNWNYTVYVVNISFHLSAGEDKIKVKRSLEDEPRLVLWALLVYNATNNTNLEGKIIQQKLLKNNESLDEGLRLHTVNVRQLGHCLAMEEPKGYYWPSIQPSEYVLPCPDKPGFSASRICFYNATNPLVTYWGPVDISNCLKEANEVANQILNLTADGQNLTSANITNIVEQVKRIVNKEENIDITLGSTLMNIFSNILSSSDSDLLESSSEALKTIDELAFKIDLNSTSHVNITTRNLALSVSSLLPGTNAISNFSIGLPSNNESYFQMDFESGQVDPLASVILPPNLLENLSPEDSVLVRRAQFTFFNKTGLFQDVGPQRKTLVSYVMACSIGNITIQNLKDPVQIKIKHTRTQEVHHPICAFWDLNKNKSFGGWNTSGCVAHRDSDASETVCLCNHFTHFGVLMDLPRSASQLDARNTKVLTFISYIGCGISAIFSAATLLTYVAFEKLRRDYPSKILMNLSTALLFLNLLFLLDGWITSFNVDGLCIAVAVLLHFFLLATFTWMGLEAIHMYIALVKVFNTYIRRYILKFCIIGWGLPALVVSVVLASRNNNEVYGKESYGKEKGDEFCWIQDPVIFYVTCAGYFGVMFFLNIAMFIVVMVQICGRNGKRSNRTLREEVLRNLRSVVSLTFLLGMTWGFAFFAWGPLNIPFMYLFSIFNSLQGLFIFIFHCAMKENVQKQWRRHLCCGRFRLADNSDWSKTATNIIKKSSDNLGKSLSSSSIGSNSTYLTSKSKSSSTTYFKRNSHTDNVSYEHSFNKSGSLRQCFHGQVLVKTGPC

SEQ ID NO: 47 - DNA, 2070 bp, Homo sapiens
  CDS (1)...(2070)
atgtttcgctcagatcgaatgtggagctgccattggaaatggaagcccagtcctctcctgttcttatttgctttatatatcatgtgtgttcctcactcagtgtggggatgtgccaactgccgagtggttttgtccaacccttctgggacctttacttctccatgctaccctaacgactacccaaacagccaggcttgcatgtggacgctccgagcccccaccggttatatcattcagataacatttaacgactttgacattgaagaagctcccaattgcatttatgactcattatcccttgataatggagagagccagactaaattttgtggagcaactgccaaaggcctatcatttaactcaagtgcgaatgagatgcatgtgtccttttcaagtgactttagcatccagaagaaaggtttcaatgccagctacatcagagttgccgtgtccttaaggaatcaaaaggtcattttaccccagacatcagatgcttaccaggtatctgttgcaaaaagcatctctattccagagctcagtgctttcacactctgctttgaagcaaccaaagttggccatgaagacagtgattggacagctttctcctactcaaatgcatccttcacacaattgctcagttttggaaaggccaagagtggctactttctatccatttctgattcaaaatgtttgttgaataatgcattacctgtcaaagaaaaagaagacatttttgcagaaagctttgaacagctctgccttgtttggaataattctttgggctctattggtgtaaatttcaaaagaaactatgaaacagttccatgtgattctaccattagtaaagttattcctgggaatgggaaattgttgttgggctccaatcaaaatgaaattgtctctctaaaaggggacatttataactttcgactttggaattttaccatgaatgccaaaatcctctccaacctcagctgtaatgtgaaagggaatgtagtcgactggcaaaatgacttctggaatatcccaaacctagctctgaaagctgaaagcaacctaagctgtggttcctacctgatcccgctcccagcagcagaactggccagctgtgcagacctggggaccctctgtcaagatggaattatctatagaatatccgtagtgattcagaacatccttcgtcaccctgaggtaaaagtacagagcaaggtggcagaatggctcaattcaaccttccaaaattggaactacacggtttatgtcgttaatatcagttttcacctgagtgctggagaggacaagattaaagtcaagagaagccttgaggatgagccaaggttggtgctttgggcccttctagtttacaatgctaccaacaatactaatttagaaggaaaaatcattcagcagaagctcctaaaaaataatgagtccttggatgaaggcttgaggctacatacagtgaatgtgagacaactgggtcattgtcttgccatggaggaacccaaaggctactactggccatctatccaaccttctgaatacgttcttccttgtccagacaagcctggcttttctgcttctcggatatgtttttacaatgctaccaacccattggtaacctactggggacctgttgatatctccaactgtttaaaagaagcaaatgaagttgctaaccagattttaaatttaactgctgatgggcagaacttaacctcagccaatattaccaacattgtggaacaggtcaaaagaattgtgaataaagaagaaaacattgatataacacttggctcaactctaatgaatatattttctaatatcttaagcagttcagacagtgacttgcttgagtcatcttctgaagctttaaaaacaattgatgaattggccttcaagatagacctaaatagcacatcacatgtgaatattacaactcggaacttggctctcagcgtatcatccctgttaccagggacaaatgcaatttcaaattttagcattggtcttccaagcaataatgaatcgtatttccaggtaatgagccagtggtttctttcattttaa

SEQ ID NO: 48 - protein, 689 aa, Homo sapiens
MFRSDRMWSCHWKWKPSPLLFLFALYIMCVPHSVWGCANCRVVLSNPSGTFTSPCYPNDYPNSQACMWTLRAPTGYIIQITFNDFDIEEAPNCIYDSLSLDNGESQTKFCGATAKGLSFNSSANEMHVSFSSDFSIQKKGFNASYIRVAVSLRNQKVILPQTSDAYQVSVAKSISIPELSAFTLCFEATKVGHEDSDWTAFSYSNASFTQLLSFGKAKSGYFLSISDSKCLLNNALPVKEKEDIFAESFEQLCLVWNNSLGSIGVNFKRNYETVPCDSTISKVIPGNGKLLLGSNQNEIVSLKGDIYNFRLWNFTMNAKILSNLSCNVKGNVVDWQNDFWNIPNLALKAESNLSCGSYLIPLPAAELASCADLGTLCQDGIIYRISVVIQNILRHPEVKVQSKVAEWLNSTFQNWNYTVYVVNISFHLSAGEDKIKVKRSLEDEPRLVLWALLVYNATNNTNLEGKIIQQKLLKNNESLDEGLRLHTVNVRQLGHCLAMEEPKGYYWPSIQPSEYVLPCPDKPGFSASRICFYNATNPLVTYWGPVDISNCLKEANEVANQILNLTADGQNLTSANITNIVEQVKRIVNKEENIDITLGSTLMNIFSNILSSSDSDLLESSSEALKTIDELAFKIDLNSTSHVNITTRNLALSVSSLLPGTNAISNFSIGLPSNNESYFQVMSQWFLSF

SEQ ID NO: 49 - DNA, 3252 bp, Homo sapiens
  CDS (1)...(3252)
atgtttcgctcagatcgaatgtggagctgccattggaaatggaagcccagtcctctcctgttcttatttgctttatatatcatgtgtgttcctcactcagtgtggggatgtgccaactgccgagtggttttgtccaacccttctgggacctttacttctccatgctaccctaacgactacccaaacagccaggcttgcatgtggacgctccgagcccccaccggttatatcattcagataacatttaacgactttgacattgaagaagctcccaattgcatttatgactcattatcccttgataatggagagagccagactaaattttgtggagcaactgccaaaggcctatcatttaactcaagtgcgaatgagatgcatgtgtccttttcaagtgactttagcatccagaagaaaggtttcaatgccagctacatcagagttgccgtgtccttaaggaatcaaaaggtcattttaccccagacatcagatgcttaccaggtatctgttgcaaaaagcatctctattccagagctcagtgctttcacactctgctttgaagcaaccaaagttggccatgaagacagtgattggacagctttctcctactcaaatgcatccttcacacaattgctcagttttggaaaggccaagagtggctactttctatccatttctgattcaaaatgtttgttgaataatgcattacctgtcaaagaaaaagaagacatttttgcagaaagctttgaacagctctgccttgtttggaataattctttgggctctattggtgtaaatttcaaaagaaactatgaaacagttccatgtgattctaccattagtaaagttattcctgggaatgggaaattgttgttgggctccaatcaaaatgaaattgtctctctaaaaggggacatttataactttcgactttggaattttaccatgaatgccaaaatcctctccaacctcagctgtaatgtgaaagggaatgtagtcgactggcaaaatgacttctggaatatcccaaacctagctctgaaagctgaaagcaacctaagctgtggttcctacctgatcccgctcccagcagcagaactggccagctgtgcagacctggggaccctctgtcaagatggaattatctatagaatatccgtagtgattcagaacatccttcgtcaccctgaggtaaaagtacagagcaaggtggcagaatggctcaattcaaccttccaaaattggaactacacggtttatgtcgttaatatcagttttcacctgagtgctggagaggacaagattaaagtcaagagaagccttgaggatgagccaaggttggtgctttgggcccttctagtttacaatgctaccaacaatactaatttagaaggaaaaatcattcagcagaagctcctaaaaaataatgagtccttggatgaaggcttgaggctacatacagtgaatgtgagacaactgggtcattgtcttgccatggaggaacccaaaggctactactggccatctatccaaccttctgaatacgttcttccttgtccagacaagcctggcttttctgcttctcggatatgtttttacaatgctaccaacccattggtaacctactggggacctgttgatatctccaactgtttaaaagaagcaaatgaagttgctaaccagattttaaatttaactgctgatgggcagaacttaacctcagccaatattaccaacattgtggaacaggtcaaaagaattgtgaataaagaagaaaacattgatataacacttggctcaactctaatgaatatattttctaatatcttaagcagttcagacagtgacttgcttgagtcatcttctgaagctttaaaaacaattgatgaattggccttcaagatagacctaaatagcacatcacatgtgaatattacaactcggaacttggctctcagcgtatcatccctgttaccagggacaaatgcaatttcaaattttagcattggtcttccaagcaataatgaatcgtatttccagatggattttgagagtggacaagtggatccactggcatctgtaattttgcctccaaacttacttgagaatttaagtccagaagattctgtattagttagaagagcacagtttactttcttcaacaaaactggacttttccaggatgtaggaccccaaagaaaaactttagtgagttatgtgatggcgtgcagtattggaaacattactatccagaatctgaaggatcctgttcaaataaaaatcaaacatacaagaactcaggaagtgcatcatcccatctgtgccttctgggatctgaacaaaaacaaaagttttggaggatggaacacgtcaggatgtgttgcacacagagattcagatgcaagtgagacagtctgcctgtgtaaccacttcacacactttggagttctgatggaccttccaagaagtgcctcacagttagatgcaagaaacactaaagtcctcactttcatcagctatattgggtgtggaatatctgctattttttcagcagcaactctcctgacatatgttgcttttgagaaattgcgaagggattatccctccaaaatcttgatgaacctgagcacagccctgctgttcctgaatctcctcttcctcctagatggctggatcacctccttcaatgtggatggactttgcattgctgttgcagtcctgttgcatttcttccttctggcaacctttacctggatggggctagaagcaattcacatgtacattgctctagttaaagtatttaacacttacattcgccgatacattctaaaattctgcatcattggctggggtttgcctgccttagtggtgtcagttgttctagcgagcagaaacaacaatgaagtctatggaaaagaaagttatgggaaagaaaaaggtgatgaattctgttggattcaagatccagtcatattttatgtgacctgtgctgggtattttggagtcatgttttttctgaacattgccatgttcattgtggtaatggtgcagatctgtgggaggaatggcaagagaagcaaccggaccctgagagaagaagtgttaaggaacctgcgcagtgtggttagcttgacctttctgttgggcatgacatggggttttgcattctttgcctggggacccttaaatatccccttcatgtacctcttctccatcttcaattcattacaaggtaagataaattgtacatga

SEQ ID NO: 50 - protein, 1083 aa, Homo sapiens
MFRSDRMWSCHWKWKPSPLLFLFALYIMCVPHSVWGCANCRVVLSNPSGTFTSPCYPNDYPNSQACMWTLRAPTGYIIQITFNDFDIEEAPNCIYDSLSLDNGESQTKFCGATAKGLSFNSSANEMHVSFSSDFSIQKKGFNASYIRVAVSLRNQKVILPQTSDAYQVSVAKSISIPELSAFTLCFEATKVGHEDSDWTAFSYSNASFTQLLSFGKAKSGYFLSISDSKCLLNNALPVKEKEDIFAESFEQLCLVWNNSLGSIGVNFKRNYETVPCDSTISKVIPGNGKLLLGSNQNEIVSLKGDIYNFRLWNFTMNAKILSNLSCNVKGNVVDWQNDFWNIPNLALKAESNLSCGSYLIPLPAAELASCADLGTLCQDGIIYRISVVIQNILRHPEVKVQSKVAEWLNSTFQNWNYTVYVVNISFHLSAGEDKIKVKRSLEDEPRLVLWALLVYNATNNTNLEGKIIQQKLLKNNESLDEGLRLHTVNVRQLGHCLAMEEPKGYYWPSIQPSEYVLPCPDKPGFSASRICFYNATNPLVTYWGPVDISNCLKEANEVANQILNLTADGQNLTSANITNIVEQVKRIVNKEENIDITLGSTLMNIFSNILSSSDSDLLESSSEALKTIDELAFKIDLNSTSHVNITTRNLALSVSSLLPGTNAISNFSIGLPSNNESYFQMDFESGQVDPLASVILPPNLLENLSPEDSVLVRRAQFTFFNKTGLFQDVGPQRKTLVSYVMACSIGNITIQNLKDPVQIKIKHTRTQEVHHPICAFWDLNKNKSFGGWNTSGCVAHRDSDASETVCLCNHFTHFGVLMDLPRSASQLDARNTKVLTFISYIGCGISAIFSAATLLTYVAFEKLRRDYPSKILMNLSTALLFLNLLFLLDGWITSFNVDGLCIAVAVLLHFFLLATFTWMGLEAIHMYIALVKVFNTYIRRYILKFCIIGWGLPALVVSVVLASRNNNEVYGKESYGKEKGDEFCWIQDPVIFYVTCAGYFGVMFFLNIAMFIVVMVQICGRNGKRSNRTLREEVLRNLRSVVSLTFLLGMTWGFAFFAWGPLNIPFMYLFSIFNSLQGKINCT

SEQ ID NO: 51 - DNA, 3669 bp, Homo sapiens
  CDS (1)...(3669)
atgatgtttcgctcagatcgaatgtggagctgccattggaaatggaagcccagtcctctcctgttcttatttgctttatatatcatgtgtgttcctcactcagtgtggggatgtgccaactgccgagtggttttgtccaacccttctgggacctttacttctccatgctaccctaacgactacccaaacagccaggcttgcatgtggacgctccgagcccccaccggttatatcattcagataacatttaacgactttgacattgaagaagctcccaattgcatttatgactcattatcccttgataatggagagagccagactaaattttgtggagcaactgccaaaggcctatcatttaactcaagtgcgaatgagatgcatgtgtccttttcaagtgactttagcatccagaagaaaggtttcaatgccagctacatcagagttgccgtgtccttaaggaatcaaaaggtcattttaccccagacatcagatgcttaccaggtatctgttgcaaaaagcatctctattccagagctcagtgctttcacactctgctttgaagcaaccaaagttggccatgaagacagtgattggacagctttctcctactcaaatgcatccttcacacaattgctcagttttggaaaggccaagagtggctactttctatccatttctgattcaaaatgtttgttgaataatgcattacctgtcaaagaaaaagaagacatttttgcagaaagctttgaacagctctgccttgtttggaataattctttgggctctattggtgtaaatttcaaaagaaactatgaaacagttccatgtgattctaccattagtaaagttattcctgggaatgggaaattgttgttgggctccaatcaaaatgaaattgtctctctaaaaggggacatttataactttcgactttggaattttaccatgaatgccaaaatcctctccaacctcagctgtaatgtgaaagggaatgtagtcgactggcaaaatgacttctggaatatcccaaacctagctctgaaagctgaaagcaacctaagctgtggttcctacctgatcccgctcccagcagcagaactggccagctgtgcagacctggggaccctctgtcaagatggaattatctatagaatatccgtagtgattcagaacatccttcgtcaccctgaggtaaaagtacagagcaaggtggcagaatggctcaattcaaccttccaaaattggaactacacggtttatgtcgttaatatcagttttcacctgagtgctggagaggacaagattaaagtcaagagaagccttgaggatgagccaaggttggtgctttgggcccttctagtttacaatgctaccaacaatactaatttagaaggaaaaatcattcagcagaagctcctaaaaaataatgagtccttggatgaaggcttgaggctacatacagtgaatgtgagacaactgggtcattgtcttgccatggaggaacccaaaggctactactggccatctatccaaccttctgaatacgttcttccttgtccagacaagcctggcttttctgcttctcggatatgtttttacaatgctaccaacccattggtaacctactggggacctgttgatatctccaactgtttaaaagaagcaaatgaagttgctaaccagattttaaatttaactgctgatgggcagaacttaacctcagccaatattaccaacattgtggaacaggtcaaaagaattgtgaataaagaagaaaacattgatataacacttggctcaactctaatgaatatattttctaatatcttaagcagttcagacagtgacttgcttgagtcatcttctgaagctttaaaaacaattgatgaattggccttcaagatagacctaaatagcacatcacatgtgaatattacaactcggaacttggctctcagcgtatcatccctgttaccagggacaaatgcaatttcaaattttagcattggtcttccaagcaataatgaatcgtatttccagatggattttgagagtggacaagtggatccactggcatctgtaattttgcctccaaacttacttgagaatttaagtccagaagattctgtattagttagaagagcacagtttactttcttcaacaaaactggacttttccaggatgtaggaccccaaagaaaaactttagtgagttatgtgatggcgtgcagtattggaaacattactatccagaatctgaaggatcctgttcaaataaaaatcaaacatacaagaactcaggaagtgcatcatcccatctgtgccttctgggatctgaacaaaaacaaaagttttggaggatggaacacgtcaggatgtgttgcacacagagattcagatgcaagtgagacagtctgcctgtgtaaccacttcacacactttggagttctgatggaccttccaagaagtgcctcacagttagatgcaagaaacactaaagtcctcactttcatcagctatattgggtgtggaatatctgctattttttcagcagcaactctcctgacatatgttgcttttgagaaattgcgaagggattatccctccaaaatcttgatgaacctgagcacagccctgctgttcctgaatctcctcttcctcctagatggctggatcacctccttcaatgtggatggactttgcattgctgttgcagtcctgttgcatttcttccttctggcaacctttacctggatggggctagaagcaattcacatgtacattgctctagttaaagtatttaacacttacattcgccgatacattctaaaattctgcatcattggctggggtttgcctgccttagtggtgtcagttgttctagcgagcagaaacaacaatgaagtctatggaaaagaaagttatgggaaagaaaaaggtgatgaattctgttggattcaagatccagtcatattttatgtgacctgtgctgggtattttggagtcatgttttttctgaacattgccatgttcattgtggtaatggtgcagatctgtgggaggaatggcaagagaagcaaccggaccctgagagaagaagtgttaaggaacctgcgcagtgtggttagcttgacctttctgttgggcatgacatggggttttgcattctttgcctggggacccttaaatatccccttcatgtacctcttctccatcttcaattcattacaaggcttatttatattcatcttccactgtgctatgaaggagaatgttcagaaacagtggcggcggcatctctgctgtggtagatttcggttagcagataactcagattggagtaagacagctaccaatatcatcaagaaaagttctgataatctaggaaaatctttgtcttcaagctccattggttccaactcaacctatcttacatccaaatctaaatccagctctaccacctatttcaaaaggaatagccacacagacagtgcttccatggacaagtccttgtcaaaactggcccatgctgatggagatcaaacatcaatcatccctgtccatcaggtcattgataaggtcaagggttattgcaatgctcattcagacaacttctataaaaatattatcatgtcagacaccttcagccacagcacaaagttttaa

SEQ ID NO: 52 - protein, 1222 aa, Homo sapiens
MMFRSDRMWSCHWKWKPSPLLFLFALYIMCVPHSVWGCANCRVVLSNPSGTFTSPCYPNDYPNSQACMWTLRAPTGYIIQITFNDFDIEEAPNCIYDSLSLDNGESQTKFCGATAKGLSFNSSANEMHVSFSSDFSIQKKGFNASYIRVAVSLRNQKVILPQTSDAYQVSVAKSISIPELSAFTLCFEATKVGHEDSDWTAFSYSNASFTQLLSFGKAKSGYFLSISDSKCLLNNALPVKEKEDIFAESFEQLCLVWNNSLGSIGVNFKRNYETVPCDSTISKVIPGNGKLLLGSNQNEIVSLKGDIYNFRLWNFTMNAKILSNLSCNVKGNVVDWQNDFWNIPNLALKAESNLSCGSYLIPLPAAELASCADLGTLCQDGIIYRISVVIQNILRHPEVKVQSKVAEWLNSTFQNWNYTVYVVNISFHLSAGEDKIKVKRSLEDEPRLVLWALLVYNATNNTNLEGKIIQQKLLKNNESLDEGLRLHTVNVRQLGHCLAMEEPKGYYWPSIQPSEYVLPCPDKPGFSASRICFYNATNPLVTYWGPVDISNCLKEANEVANQILNLTADGQNLTSANITNIVEQVKRIVNKEENIDITLGSTLMNIFSNILSSSDSDLLESSSEALKTIDELAFKIDLNSTSHVNITTRNLALSVSSLLPGTNAISNFSIGLPSNNESYFQMDFESGQVDPLASVILPPNLLENLSPEDSVLVRRAQFTFFNKTGLFQDVGPQRKTLVSYVMACSIGNITIQNLKDPVQIKIKHTRTQEVHHPICAFWDLNKNKSFGGWNTSGCVAHRDSDASETVCLCNHFTHFGVLMDLPRSASQLDARNTKVLTFISYIGCGISAIFSAATLLTYVAFEKLRRDYPSKILMNLSTALLFLNLLFLLDGWITSFNVDGLCIAVAVLLHFFLLATFTWMGLEAIHMYIALVKVFNTYIRRYILKFCIIGWGLPALVVSVVLASRNNNEVYGKESYGKEKGDEFCWIQDPVIFYVTCAGYFGVMFFLNIAMFIVVMVQICGRNGKRSNRTLREEVLRNLRSVVSLTFLLGMTWGFAFFAWGPLNIPFMYLFSIFNSLQGLFIFIFHCAMKENVQKQWRRHLCCGRFRLADNSDWSKTATNIIKKSSDNLGKSLSSSSIGSNSTYLTSKSKSSSTTYFKRNSHTDSASMDKSLSKLAHADGDQTSIIPVHQVIDKVKGYCNAHSDNFYKNIIMSDTFSHSTKF

SEQ ID NO: 53 - DNA, 3582 bp, Homo sapiens
  CDS (1)...(3582)
atgatgtttcgctcagatcgaatgtggagctgccattggaaatggaagcccagtcctctcctgttcttatttgctttatatatcatgtgtgttcctcactcagtgtggggatgtgccaactgccgagtggttttgtccaacccttctgggacctttacttctccatgctaccctaacgactacccaaacagccaggcttgcatgtggacgctccgagcccccaccggttatatcattcagataacatttaacgactttgacattgaagaagctcccaattgcatttatgactcattatcccttgataatggagagagccagactaaattttgtggagcaactgccaaaggcctatcatttaactcaagtgcgaatgagatgcatgtgtccttttcaagtgactttagcatccagaagaaaggtttcaatgccagctacatcagagttgccgtgtccttaaggaatcaaaaggtcattttaccccagacatcagatgcttaccaggtatctgttgcaaaaagcatctctattccagagctcagtgctttcacactctgctttgaagcaaccaaagttggccatgaagacagtgattggacagctttctcctactcaaatgcatccttcacacaattgctcagttttggaaaggccaagagtggctactttctatccatttctgattcaaaatgtttgttgaataatgcattacctgtcaaagaaaaagaagacatttttgcagaaagctttgaacagctctgccttgtttggaataattctttgggctctattggtgtaaatttcaaaagaaactatgaaacagttccatgtgattctaccattagtaaagttattcctgggaatgggaaattgttgttgggctccaatcaaaatgaaattgtctctctaaaaggggacatttataactttcgactttggaattttaccatgaatgccaaaatcctctccaacctcagctgtaatgtgaaagggaatgtagtcgactggcaaaatgacttctggaatatcccaaacctagctctgaaagctgaaagcaacctaagctgtggttcctacctgatcccgctcccagcagcagaactggccagctgtgcagacctggggaccctctgtcaagatggaattatctatagaatatccgtagtgattcagaacatccttcgtcaccctgaggtaaaagtacagagcaaggtggcagaatggctcaattcaaccttccaaaattggaactacacggtttatgtcgttaatatcagttttcacctgagtgctggagaggacaagattaaagtcaagagaagccttgaggatgagccaaggttggtgctttgggcccttctagtttacaatgctaccaacaatactaatttagaaggaaaaatcattcagcagaagctcctaaaaaataatgagtccttggatgaaggcttgaggctacatacagtgaatgtgagacaactgggtcattgtcttgccatggaggaacccaaaggctactactggccatctatccaaccttctgaatacgttcttccttgtccagacaagcctggcttttctgcttctcggatatgtttttacaatgctaccaacccattggtaacctactggggacctgttgatatctccaactgtttaaaagaagcaaatgaagttgctaaccagattttaaatttaactgctgatgggcagaacttaacctcagccaatattaccaacattgtggaacaggtcaaaagaattgtgaataaagaagaaaacattgatataacacttggctcaactctaatgaatatattttctaatatcttaagcagttcagacagtgacttgcttgagtcatcttctgaagctttaaaaacaattgatgaattggccttcaagatagacctaaatagcacatcacatgtgaatattacaactcggaacttggctctcagcgtatcatccctgttaccagggacaaatgcaatttcaaattttagcattggtcttccaagcaataatgaatcgtatttccagatggattttgagagtggacaagtggatccactggcatctgtaattttgcctccaaacttacttgagaatttaagtccagaagattctgtattagttagaagagcacagtttactttcttcaacaaaactggacttttccaggatgtaggaccccaaagaaaaactttagtgagttatgtgatggcgtgcagtattggaaacattactatccagaatctgaaggatcctgttcaaataaaaatcaaacatacaagaactcaggaagtgcatcatcccatctgtgccttctgggatctgaacaaaaacaaaagttttggaggatggaacacgtcaggatgtgttgcacacagagattcagatgcaagtgagacagtctgcctgtgtaaccacttcacacactttggagttctgatggaccttccaagaagtgcctcacagttagatgcaagaaacactaaagtcctcactttcatcagctatattgggtgtggaatatctgctattttttcagcagcaactctcctgacatatgttgcttttgagaaattgcgaagggattatccctccaaaatcttgatgaacctgagcacagccctgctgttcctgaatctcctcttcctcctagatggctggatcacctccttcaatgtggatggactttgcattgctgttgcagtcctgttgcatttcttccttctggcaacctttacctggatggggctagaagcaattcacatgtacattgctctagttaaagtatttaacacttacattcgccgatacattctaaaattctgcatcattggctggggtttgcctgccttagtggtgtcagttgttctagcgagcagaaacaacaatgaagtctatggaaaagaaagttatgggaaagaaaaaggtgatgaattctgttggattcaagatccagtcatattttatgtgacctgtgctgggtattttggagtcatgttttttctgaacattgccatgttcattgtggtaatggtgcagatctgtgggaggaatggcaagagaagcaaccggaccctgagagaagaagtgttaaggaacctgcgcagtgtggttagcttgacctttctgttgggcatgacatggggttttgcattctttgcctggggacccttaaatatccccttcatgtacctcttctccatcttcaattcattacaaggcttatttatattcatcttccactgtgctatgaaggagaatgttcagaaacagtggcggcggcatctctgctgtggtagatttcggttagcagataactcagattggagtaagacagctaccaatatcatcaagaaaagttctgataatctaggaaaatctttgtcttcaagctccattggttccaactcaacctatcttacatccaaatctaaatccagctctaccacctatttcaaaaggaatagccacacagataatgtctcctatgagcattccttcaacaaaagtggatcactcagacagtgcttccatggacaagtccttgtcaaaactggcccatgctga

SEQ ID NO: 54 - protein, 1193 aa, Homo sapiens
MMFRSDRMWSCHWKWKPSPLLFLFALYIMCVPHSVWGCANCRVVLSNPSGTFTSPCYPNDYPNSQACMWTLRAPTGYIIQITFNDFDIEEAPNCIYDSLSLDNGESQTKFCGATAKGLSFNSSANEMHVSFSSDFSIQKKGFNASYIRVAVSLRNQKVILPQTSDAYQVSVAKSISIPELSAFTLCFEATKVGHEDSDWTAFSYSNASFTQLLSFGKAKSGYFLSISDSKCLLNNALPVKEKEDIFAESFEQLCLVWNNSLGSIGVNFKRNYETVPCDSTISKVIPGNGKLLLGSNQNEIVSLKGDIYNFRLWNFTMNAKILSNLSCNVKGNVVDWQNDFWNIPNLALKAESNLSCGSYLIPLPAAELASCADLGTLCQDGIIYRISVVIQNILRHPEVKVQSKVAEWLNSTFQNWNYTVYVVNISFHLSAGEDKIKVKRSLEDEPRLVLWALLVYNATNNTNLEGKIIQQKLLKNNESLDEGLRLHTVNVRQLGHCLAMEEPKGYYWPSIQPSEYVLPCPDKPGFSASRICFYNATNPLVTYWGPVDISNCLKEANEVANQILNLTADGQNLTSANITNIVEQVKRIVNKEENIDITLGSTLMNIFSNILSSSDSDLLESSSEALKTIDELAFKIDLNSTSHVNITTRNLALSVSSLLPGTNAISNFSIGLPSNNESYFQMDFESGQVDPLASVILPPNLLENLSPEDSVLVRRAQFTFFNKTGLFQDVGPQRKTLVSYVMACSIGNITIQNLKDPVQIKIKHTRTQEVHHPICAFWDLNKNKSFGGWNTSGCVAHRDSDASETVCLCNHFTHFGVLMDLPRSASQLDARNTKVLTFISYIGCGISAIFSAATLLTYVAFEKLRRDYPSKILMNLSTALLFLNLLFLLDGWITSFNVDGLCIAVAVLLHFFLLATFTWMGLEAIHMYIALVKVFNTYIRRYILKFCIIGWGLPALVVSVVLASRNNNEVYGKESYGKEKGDEFCWIQDPVIFYVTCAGYFGVMFFLNIAMFIVVMVQICGRNGKRSNRTLREEVLRNLRSVVSLTFLLGMTWGFAFFAWGPLNIPFMYLFSIFNSLQGLFIFIFHCAMKENVQKQWRRHLCCGRFRLADNSDWSKTATNIIKKSSDNLGKSLSSSSIGSNSTYLTSKSKSSSTTYFKRNSHTDNVSYEHSFNKSGSLRQCFHGQVLVKTGPC

SEQ ID NO: 55 - DNA, 2073 bp, Homo sapiens
  CDS (1)...(2073)
atgatgtttcgctcagatcgaatgtggagctgccattggaaatggaagcccagtcctctcctgttcttatttgctttatatatcatgtgtgttcctcactcagtgtggggatgtgccaactgccgagtggttttgtccaacccttctgggacctttacttctccatgctaccctaacgactacccaaacagccaggcttgcatgtggacgctccgagcccccaccggttatatcattcagataacatttaacgactttgacattgaagaagctcccaattgcatttatgactcattatcccttgataatggagagagccagactaaattttgtggagcaactgccaaaggcctatcatttaactcaagtgcgaatgagatgcatgtgtccttttcaagtgactttagcatccagaagaaaggtttcaatgccagctacatcagagttgccgtgtccttaaggaatcaaaaggtcattttaccccagacatcagatgcttaccaggtatctgttgcaaaaagcatctctattccagagctcagtgctttcacactctgctttgaagcaaccaaagttggccatgaagacagtgattggacagctttctcctactcaaatgcatccttcacacaattgctcagttttggaaaggccaagagtggctactttctatccatttctgattcaaaatgtttgttgaataatgcattacctgtcaaagaaaaagaagacatttttgcagaaagctttgaacagctctgccttgtttggaataattctttgggctctattggtgtaaatttcaaaagaaactatgaaacagttccatgtgattctaccattagtaaagttattcctgggaatgggaaattgttgttgggctccaatcaaaatgaaattgtctctctaaaaggggacatttataactttcgactttggaattttaccatgaatgccaaaatcctctccaacctcagctgtaatgtgaaagggaatgtagtcgactggcaaaatgacttctggaatatcccaaacctagctctgaaagctgaaagcaacctaagctgtggttcctacctgatcccgctcccagcagcagaactggccagctgtgcagacctggggaccctctgtcaagatggaattatctatagaatatccgtagtgattcagaacatccttcgtcaccctgaggtaaaagtacagagcaaggtggcagaatggctcaattcaaccttccaaaattggaactacacggtttatgtcgttaatatcagttttcacctgagtgctggagaggacaagattaaagtcaagagaagccttgaggatgagccaaggttggtgctttgggcccttctagtttacaatgctaccaacaatactaatttagaaggaaaaatcattcagcagaagctcctaaaaaataatgagtccttggatgaaggcttgaggctacatacagtgaatgtgagacaactgggtcattgtcttgccatggaggaacccaaaggctactactggccatctatccaaccttctgaatacgttcttccttgtccagacaagcctggcttttctgcttctcggatatgtttttacaatgctaccaacccattggtaacctactggggacctgttgatatctccaactgtttaaaagaagcaaatgaagttgctaaccagattttaaatttaactgctgatgggcagaacttaacctcagccaatattaccaacattgtggaacaggtcaaaagaattgtgaataaagaagaaaacattgatataacacttggctcaactctaatgaatatattttctaatatcttaagcagttcagacagtgacttgcttgagtcatcttctgaagctttaaaaacaattgatgaattggccttcaagatagacctaaatagcacatcacatgtgaatattacaactcggaacttggctctcagcgtatcatccctgttaccagggacaaatgcaatttcaaattttagcattggtcttccaagcaataatgaatcgtatttccaggtaatgagccagtggtttctttcattttaa

SEQ ID NO: 56 - protein, 690 aa, Homo sapiens
MMFRSDRMWSCHWKWKPSPLLFLFALYIMCVPHSVWGCANCRVVLSNPSGTFTSPCYPNDYPNSQACMWTLRAPTGYIIQITFNDFDIEEAPNCIYDSLSLDNGESQTKFCGATAKGLSFNSSANEMHVSFSSDFSIQKKGFNASYIRVAVSLRNQKVILPQTSDAYQVSVAKSISIPELSAFTLCFEATKVGHEDSDWTAFSYSNASFTQLLSFGKAKSGYFLSISDSKCLLNNALPVKEKEDIFAESFEQLCLVWNNSLGSIGVNFKRNYETVPCDSTISKVIPGNGKLLLGSNQNEIVSLKGDIYNFRLWNFTMNAKILSNLSCNVKGNVVDWQNDFWNIPNLALKAESNLSCGSYLIPLPAAELASCADLGTLCQDGIIYRISVVIQNILRHPEVKVQSKVAEWLNSTFQNWNYTVYVVNISFHLSAGEDKIKVKRSLEDEPRLVLWALLVYNATNNTNLEGKIIQQKLLKNNESLDEGLRLHTVNVRQLGHCLAMEEPKGYYWPSIQPSEYVLPCPDKPGFSASRICFYNATNPLVTYWGPVDISNCLKEANEVANQILNLTADGQNLTSANITNIVEQVKRIVNKEENIDITLGSTLMNIFSNILSSSDSDLLESSSEALKTIDELAFKIDLNSTSHVNITTRNLALSVSSLLPGTNAISNFSIGLPSNNESYFQVMSQWFLSF

SEQ ID NO: 57 - DNA, 3255 bp, Homo sapiens
  CDS (1)...(3255)
atgatgtttcgctcagatcgaatgtggagctgccattggaaatggaagcccagtcctctcctgttcttatttgctttatatatcatgtgtgttcctcactcagtgtggggatgtgccaactgccgagtggttttgtccaacccttctgggacctttacttctccatgctaccctaacgactacccaaacagccaggcttgcatgtggacgctccgagcccccaccggttatatcattcagataacatttaacgactttgacattgaagaagctcccaattgcatttatgactcattatcccttgataatggagagagccagactaaattttgtggagcaactgccaaaggcctatcatttaactcaagtgcgaatgagatgcatgtgtccttttcaagtgactttagcatccagaagaaaggtttcaatgccagctacatcagagttgccgtgtccttaaggaatcaaaaggtcattttaccccagacatcagatgcttaccaggtatctgttgcaaaaagcatctctattccagagctcagtgctttcacactctgctttgaagcaaccaaagttggccatgaagacagtgattggacagctttctcctactcaaatgcatccttcacacaattgctcagttttggaaaggccaagagtggctactttctatccatttctgattcaaaatgtttgttgaataatgcattacctgtcaaagaaaaagaagacatttttgcagaaagctttgaacagctctgccttgtttggaataattctttgggctctattggtgtaaatttcaaaagaaactatgaaacagttccatgtgattctaccattagtaaagttattcctgggaatgggaaattgttgttgggctccaatcaaaatgaaattgtctctctaaaaggggacatttataactttcgactttggaattttaccatgaatgccaaaatcctctccaacctcagctgtaatgtgaaagggaatgtagtcgactggcaaaatgacttctggaatatcccaaacctagctctgaaagctgaaagcaacctaagctgtggttcctacctgatcccgctcccagcagcagaactggccagctgtgcagacctggggaccctctgtcaagatggaattatctatagaatatccgtagtgattcagaacatccttcgtcaccctgaggtaaaagtacagagcaaggtggcagaatggctcaattcaaccttccaaaattggaactacacggtttatgtcgttaatatcagttttcacctgagtgctggagaggacaagattaaagtcaagagaagccttgaggatgagccaaggttggtgctttgggcccttctagtttacaatgctaccaacaatactaatttagaaggaaaaatcattcagcagaagctcctaaaaaataatgagtccttggatgaaggcttgaggctacatacagtgaatgtgagacaactgggtcattgtcttgccatggaggaacccaaaggctactactggccatctatccaaccttctgaatacgttcttccttgtccagacaagcctggcttttctgcttctcggatatgtttttacaatgctaccaacccattggtaacctactggggacctgttgatatctccaactgtttaaaagaagcaaatgaagttgctaaccagattttaaatttaactgctgatgggcagaacttaacctcagccaatattaccaacattgtggaacaggtcaaaagaattgtgaataaagaagaaaacattgatataacacttggctcaactctaatgaatatattttctaatatcttaagcagttcagacagtgacttgcttgagtcatcttctgaagctttaaaaacaattgatgaattggccttcaagatagacctaaatagcacatcacatgtgaatattacaactcggaacttggctctcagcgtatcatccctgttaccagggacaaatgcaatttcaaattttagcattggtcttccaagcaataatgaatcgtatttccagatggattttgagagtggacaagtggatccactggcatctgtaattttgcctccaaacttacttgagaatttaagtccagaagattctgtattagttagaagagcacagtttactttcttcaacaaaactggacttttccaggatgtaggaccccaaagaaaaactttagtgagttatgtgatggcgtgcagtattggaaacattactatccagaatctgaaggatcctgttcaaataaaaatcaaacatacaagaactcaggaagtgcatcatcccatctgtgccttctgggatctgaacaaaaacaaaagttttggaggatggaacacgtcaggatgtgttgcacacagagattcagatgcaagtgagacagtctgcctgtgtaaccacttcacacactttggagttctgatggaccttccaagaagtgcctcacagttagatgcaagaaacactaaagtcctcactttcatcagctatattgggtgtggaatatctgctattttttcagcagcaactctcctgacatatgttgcttttgagaaattgcgaagggattatccctccaaaatcttgatgaacctgagcacagccctgctgttcctgaatctcctcttcctcctagatggctggatcacctccttcaatgtggatggactttgcattgctgttgcagtcctgttgcatttcttccttctggcaacctttacctggatggggctagaagcaattcacatgtacattgctctagttaaagtatttaacacttacattcgccgatacattctaaaattctgcatcattggctggggtttgcctgccttagtggtgtcagttgttctagcgagcagaaacaacaatgaagtctatggaaaagaaagttatgggaaagaaaaaggtgatgaattctgttggattcaagatccagtcatattttatgtgacctgtgctgggtattttggagtcatgttttttctgaacattgccatgttcattgtggtaatggtgcagatctgtgggaggaatggcaagagaagcaaccggaccctgagagaagaagtgttaaggaacctgcgcagtgtggttagcttgacctttctgttgggcatgacatggggttttgcattctttgcctggggacccttaaatatccccttcatgtacctcttctccatcttcaattcattacaaggtaagataaattgtacatga

SEQ ID NO: 58 - protein, 1084 aa, Homo sapiens
MMFRSDRMWSCHWKWKPSPLLFLFALYIMCVPHSVWGCANCRVVLSNPSGTFTSPCYPNDYPNSQACMWTLRAPTGYIIQITFNDFDIEEAPNCIYDSLSLDNGESQTKFCGATAKGLSFNSSANEMHVSFSSDFSIQKKGFNASYIRVAVSLRNQKVILPQTSDAYQVSVAKSISIPELSAFTLCFEATKVGHEDSDWTAFSYSNASFTQLLSFGKAKSGYFLSISDSKCLLNNALPVKEKEDIFAESFEQLCLVWNNSLGSIGVNFKRNYETVPCDSTISKVIPGNGKLLLGSNQNEIVSLKGDIYNFRLWNFTMNAKILSNLSCNVKGNVVDWQNDFWNIPNLALKAESNLSCGSYLIPLPAAELASCADLGTLCQDGIIYRISVVIQNILRHPEVKVQSKVAEWLNSTFQNWNYTVYVVNISFHLSAGEDKIKVKRSLEDEPRLVLWALLVYNATNNTNLEGKIIQQKLLKNNESLDEGLRLHTVNVRQLGHCLAMEEPKGYYWPSIQPSEYVLPCPDKPGFSASRICFYNATNPLVTYWGPVDISNCLKEANEVANQILNLTADGQNLTSANITNIVEQVKRIVNKEENIDITLGSTLMNIFSNILSSSDSDLLESSSEALKTIDELAFKIDLNSTSHVNITTRNLALSVSSLLPGTNAISNFSIGLPSNNESYFQMDFESGQVDPLASVILPPNLLENLSPEDSVLVRRAQFTFFNKTGLFQDVGPQRKTLVSYVMACSIGNITIQNLKDPVQIKIKHTRTQEVHHPICAFWDLNKNKSFGGWNTSGCVAHRDSDASETVCLCNHFTHFGVLMDLPRSASQLDARNTKVLTFISYIGCGISAIFSAATLLTYVAFEKLRRDYPSKILMNLSTALLFLNLLFLLDGWITSFNVDGLCIAVAVLLHFFLLATFTWMGLEAIHMYIALVKVFNTYIRRYILKFCIIGWGLPALVVSVVLASRNNNEVYGKESYGKEKGDEFCWIQDPVIFYVTCAGYFGVMFFLNIAMFIVVMVQICGRNGKRSNRTLREEVLRNLRSVVSLTFLLGMTWGFAFFAWGPLNIPFMYLFSIFNSLQGKINCT

SEQ ID NO: 59 - DNA, 3579 bp, Homo sapiens; identical to SEQ ID NO: 45
  CDS (1)...(3579)

SEQ ID NO: 60 - protein, 1192 aa, Homo sapiens; identical to SEQ ID NO: 46

SEQ ID NO: 61 - DNA, 4446 bp, Homo sapiens
ttgcgccgtcgggaaagcccatgaactctccagaaacggcgtaaaggagggtcccgccgcggcgcagggctggggcgcctgggttccccctgggtggagcagcggcagcagagcgggaaagtggtggaggatgatcttgcggccaaaggggacctcggcgcagtaatgtcaacataattaaacaaggagtaacaggcaccgctcctcagtccaaaggcctggccctgccaagaaggcgctctccggaatcaacacctgggggcttggaaggatgtttcgctcagatcgaatgtggagctgccattggaaatggaagcccagtcctctcctgttcttatttgctttatatatcatgtgtgttcctcactcagtgtggggatgtgccaactgccgagtggttttgtccaacccttctgggacctttacttctccatgctaccctaacgactacccaaacagccaggcttgcatgtggacgctccgagcccccaccggttatatcattcagataacatttaacgactttgacattgaagaagctcccaattgcatttatgactcattatcccttgataatggagagagccagactaaattttgtggagcaactgccaaaggcctatcatttaactcaagtgcgaatgagatgcatgtgtccttttcaagtgactttagcatccagaagaaaggtttcaatgccagctacatcagagttgccgtgtccttaaggaatcaaaaggtcattttaccccagacatcagatgcttaccaggtatctgttgcaaaaagcatctctattccagagctcagtgctttcacactctgctttgaagcaaccaaagttggccatgaagacagtgattggacagctttctcctactcaaatgcatccttcacacaattgctcagttttggaaaggccaagagtggctactttctatccatttctgattcaaaatgtttgttgaataatgcattacctgtcaaagaaaaagaagacatttttgcagaaagctttgaacagctctgccttgtttggaataattctttgggctctattggtgtaaatttcaaaagaaactatgaaacagttccatgtgattctaccattagtaaagttattcctgggaatgggaaattgttgttgggctccaatcaaaatgaaattgtctctctaaaaggggacatttataactttcgactttggaattttaccatgaatgccaaaatcctctccaacctcagctgtaatgtgaaagggaatgtagtcgactggcaaaatgacttctggaatatcccaaacctagctctgaaagctgaaagcaacctaagctgtggttcctacctgatcccgctcccagcagcagaactggccagctgtgcagacctggggaccctctgtcaagatggaattatctatagaatatccgtagtgattcagaacatccttcgtcaccctgaggtaaaagtacagagcaaggtggcagaatggctcaattcaaccttccaaaattggaactacacggtttatgtcgttaatatcagttttcacctgagtgctggagaggacaagattaaagtcaagagaagccttgaggatgagccaaggttggtgctttgggcccttctagtttacaatgctaccaacaatactaatttagaaggaaaaatcattcagcagaagctcctaaaaaataatgagtccttggatgaaggcttgaggctacatacagtgaatgtgagacaactgggtcattgtcttgccatggaggaacccaaaggctactactggccatctatccaaccttctgaatacgttcttccttgtccagacaagcctggcttttctgcttctcggatatgtttttacaatgctaccaacccattggtaacctactggggacctgttgatatctccaactgtttaaaagaagcaaatgaagttgctaaccagattttaaatttaactgctgatgggcagaacttaacctcagccaatattaccaacattgtggaacaggtcaaaagaattgtgaataaagaagaaaacattgatataacacttggctcaactctaatgaatatattttctaatatcttaagcagttcagacagtgacttgcttgagtcatcttctgaagctttaaaaacaattgatgaattggccttcaagatagacctaaatagcacatcacatgtgaatattacaactcggaacttggctctcagcgtatcatccctgttaccagggacaaatgcaatttcaaattttagcattggtcttccaagcaataatgaatcgtatttccagatggattttgagagtggacaagtggatccactggcatctgtaattttgcctccaaacttacttgagaatttaagtccagaagattctgtattagttagaagagcacagtttactttcttcaacaaaactggacttttccaggatgtaggaccccaaagaaaaactttagtgagttatgtgatggcgtgcagtattggaaacattactatccagaatctgaaggatcctgttcaaataaaaatcaaacatacaagaactcaggaagtgcatcatcccatctgtgccttctgggatctgaacaaaaacaaaagttttggaggatggaacacgtcaggatgtgttgcacacagagattcagatgcaagtgagacagtctgcctgtgtaaccacttcacacactttggagttctgatggaccttccaagaagtgcctcacagttagatgcaagaaacactaaagtcctcactttcatcagctatattgggtgtggaatatctgctattttttcagcagcaactctcctgacatatgttgcttttgagaaattgcgaagggattatccctccaaaatcttgatgaacctgagcacagccctgctgttcctgaatctcctcttcctcctagatggctggatcacctccttcaatgtggatggactttgcattgctgttgcagtcctgttgcatttcttccttctggcaacctttacctggatggggctagaagcaattcacatgtacattgctctagttaaagtatttaacacttacattcgccgatacattctaaaattctgcatcattggctggggtttgcctgccttagtggtgtcagttgttctagcgagcagaaacaacaatgaagtctatggaaaagaaagttatgggaaagaaaaaggtgatgaattctgttggattcaagatccagtcatattttatgtgacctgtgctgggtattttggagtcatgttttttctgaacattgccatgttcattgtggtaatggtgcagatctgtgggaggaatggcaagagaagcaaccggaccctgagagaagaagtgttaaggaacctgcgcagtgtggttagcttgacctttctgttgggcatgacatggggttttgcattctttgcctggggacccttaaatatccccttcatgtacctcttctccatcttcaattcattacaaggcttatttatattcatcttccactgtgctatgaaggagaatgttcagaaacagtggcggcggcatctctgctgtggtagatttcggttagcagataactcagattggagtaagacagctaccaatatcatcaagaaaagttctgataatctaggaaaatctttgtcttcaagctccattggttccaactcaacctatcttacatccaaatctaaatccagctctaccacctatttcaaaaggaatagccacacagataatgtctcctatgagcattccttcaacaaaagtggatcactcagacagtgcttccatggacaagtccttgtcaaaactggcccatgctgatggagatcaaacatcaatcatccctgtccatcaggtcattgataaggtcaagggttattgcaatgctcattcagacaacttctataaaaatattatcatgtcagacaccttcagccacagcacaaagttttaatgtctttaagaaaaagaaatcaatctgcagaaatgtgaagatttgcaagcagtgtaaactgcaactagtgatgtaaatgtgctattacctaggtaactgcatatatataaggaatgtattttgttaagaaggcttttgtgaaattcagaatttttctttttaatatatttcttccatggaagagttgtcatcactaaaacttcagtactgagagtaacatgactcagtagccacagaagctatgatttgtaaaatatataattgaatcagagtaatcataatgcaggggagacattcaaattagagacaagggagaagcaatgctgaggaagaccctagatagagctcattttactccacctaatcgttatatctggatatacccattttctgcatcttctttctcaacaataaaaaatgtaactattttgaatgcccacaaaaaaaaaaaaaaaaaaaaaaa

SEQ ID NO: 62 - DNA, 678 bp, Homo sapiens
  CDS (1)...(678)
atggcgacgcccaggggcctgggggccctgctcctgctcctcctgctcccgacctcaggtcaggaaaagcccaccgaagggccaagaaacacctgcctggggagcaacaacatgtacgacatcttcaacttgaatgacaaggctttgtgcttcaccaagtgcaggcagtcgggcagcgactcctgcaatgtggaaaacttgcagagatactggctaaactacgaggcccatctgatgaaggaaggtttgacgcagaaggtgaacacgcctttcctgaaggctttggtccagaacctcagcaccaacactgcagaagacttctatttctctctggagccctctcaggttccgaggcaggtgatgaaggacgaggacaagccccctgacagagtgcgacttcccaagagcctttttcgatccctgccaggcaacaggtctgtggtccgcttggccgtcaccattctggacattggtccagggactctcttcaagggcccccggctcggcctgggagatggcagcggcgtgttgaacaatcgcctggtgggtttgagtgtgggacaaatgcatgtcaccaagctggctgagcctctggagatcgtcttctctcaccagcgaccgccccctgtgagtcccctgctcaggcctggcagccactgcagggcagacagaacatga

SEQ ID NO: 63 - protein, 225 aa, Homo sapiens [sequence omitted]

SEQ ID NO: 64 - DNA, 1527 bp, Homo sapiens
  CDS (1)...(1527)
atggcgacgcccaggggcctgggggccctgctcctgctcctcctgctcccgacctcaggtcaggaaaagcccaccgaagggccaagaaacacctgcctggggagcaacaacatgtacgacatcttcaacttgaatgacaaggctttgtgcttcaccaagtgcaggcagtcgggcagcgactcctgcaatgtggaaaacttgcagagatactggctaaactacgaggcccatctgatgaaggaaggtttgacgcagaaggtgaacacgcctttcctgaaggctttggtccagaacctcagcaccaacactgcagaagacttctatttctctctggagccctctcaggttccgaggcaggtgatgaaggacgaggacaagccccctgacagagtgcgacttcccaagagcctttttcgatccctgccaggcaacaggtctgtggtccgcttggccgtcaccattctggacattggtccagggactctcttcaagggcccccggctcggcctgggagatggcagcggcgtgttgaacaatcgcctggtgggtttgagtgtgggacaaatgcatgtcaccaagctggctgagcctctggagatcgtcttctctcaccagcgaccgccccctaacatgaccctcacctgtgtattctgggatgtgactaaagggaccactggagactggtcttctgagggctgctccacggaggtcagacctgaggggaccgtgtgctgctgtgaccacctgacctttttcgccctgctcctgagacccaccttggaccagtccacggtgcatatcctcacacgcatctcccaggcgggctgtggggtctccatgatcttcctggccttcaccattattctttatgcctttctgaggctttcccgggagaggttcaagtcagaagatgccccaaagatccacgtggccctgggtggcagcctgttcctcctgaatctggccttcttggtcaatgtggggagtggctcaaaggggtctgatgctgcctgctgggcccggggggctgtcttccactacttcctgctctgtgccttcacctggatgggccttgaagccttccacctctacctgctcgctgtcagggtcttcaacacctacttcgggcactacttcctgaagctgagcctggtgggctggggcctgcccgccctgatggtcatcggcactgggagtgccaacagctacggcctctacaccatccgtgatagggagaaccgcacctctctggagctatgctggttccgtgaagggacaaccatgtacgccctctatatcaccgtccacggctacttcctcatcaccttcctctttggcatggtggtcctggccctggtggtctggaagatcttcaccctgtcccgtgctacagcggtcaaggagcgggggaagaaccggaagaaggtgctcaccctgctgggcctctcgagccttgcaagttgggtgtccatcgtccatctctggtccaatcagctgcgaccagaagggcagaatcatgtgatatga

SEQ ID NO: 65 - protein, 508 aa, Homo sapiens
MATPRGLGALLLLLLLPTSGQEKPTEGPRNTCLGSNNMYDIFNLNDKALCFTKCRQSGSDSCNVENLQRYWLNYEAHLMKEGLTQKVNTPFLKALVQNLSTNTAEDFYFSLEPSQVPRQVMKDEDKPPDRVRLPKSLFRSLPGNRSVVRLAVTILDIGPGTLFKGPRLGLGDGSGVLNNRLVGLSVGQMHVTKLAEPLEIVFSHQRPPPNMTLTCVFWDVTKGTTGDWSSEGCSTEVRPEGTVCCCDHLTFFALLLRPTLDQSTVHILTRISQAGCGVSMIFLAFTIILYAFLRLSRERFKSEDAPKIHVALGGSLFLLNLAFLVNVGSGSKGSDAACWARGAVFHYFLLCAFTWMGLEAFHLYLLAVRVFNTYFGHYFLKLSLVGWGLPALMVIGTGSANSYGLYTIRDRENRTSLELCWFREGTTMYALYITVHGYFLITFLFGMVVLALVVWKIFTLSRATAVKERGKNRKKVLTLLGLSSLASWVSIVHLWSNQLRPEGQNHVI

SEQ ID NO: 66 - DNA, 897 bp, Homo sapiens
  CDS (1)...(897)
atgaccctcacctgtgtattctgggatgtgactaaagggaccactggagactggtcttctgagggctgctccacggaggtcagacctgaggggaccgtgtgctgctgtgaccacctgacctttttcgccctgctcctgagacccaccttggaccagtccacggtgcatatcctcacacgcatctcccaggcgggctgtggggtctccatgatcttcctggccttcaccattattctttatgcctttctgaggctttcccgggagaggttcaagtcagaagatgccccaaagatccacgtggccctgggtggcagcctgttcctcctgaatctggccttcttggtcaatgtggggagtggctcaaaggggtctgatgctgcctgctgggcccggggggctgtcttccactacttcctgctctgtgccttcacctggatgggccttgaagccttccacctctacctgctcgctgtcagggtcttcaacacctacttcgggcactacttcctgaagctgagcctggtgggctggggcctgcccgccctgatggtcatcggcactgggagtgccaacagctacggcctctacaccatccgtgatagggagaaccgcacctctctggagctatgctggttccgtgaagggacaaccatgtacgccctctatatcaccgtccacggctacttcctcatcaccttcctctttggcatggtggtcctggccctggtggtctggaagatcttcaccctgtcccgtgctacagcggtcaaggagcgggggaagaaccggaagaaggtgctcaccctgctgggcctctcgagccttgcaagttgggtgtccatcgtccatctctggtccaatcagctgcgaccagaagggcagaatcatgtgatatga

SEQ ID NO: 67 - protein, 298 aa, Homo sapiens
MTLTCVFWDVTKGTTGDWSSEGCSTEVRPEGTVCCCDHLTFFALLLRPTLDQSTVHILTRISQAGCGVSMIFLAFTIILYAFLRLSRERFKSEDAPKIHVALGGSLFLLNLAFLVNVGSGSKGSDAACWARGAVFHYFLLCAFTWMGLEAFHLYLLAVRVFNTYFGHYFLKLSLVGWGLPALMVIGTGSANSYGLYTIRDRENRTSLELCWFREGTTMYALYITVHGYFLITFLFGMVVLALVVWKIFTLSRATAVKERGKNRKKVLTLLGLSSLASWVSIVHLWSNQLRPEGQNHVI

SEQ ID NO: 68 - DNA, 1080 bp, Homo sapiens
  CDS (1)...(1080)
atggccccttctgcagcctggcctccccgatctcccctttcacagggcccccggctcggcctgggagatggcagcggcgtgttgaacaatcgcctggtgggtttgagtgtgggacaaatgcatgtcaccaagctggctgagcctctggagatcgtcttctctcaccagcgaccgccccctaacatgaccctcacctgtgtattctgggatgtgactaaagggaccactggagactggtcttctgagggctgctccacggaggtcagacctgaggggaccgtgtgctgctgtgaccacctgacctttttcgccctgctcctgagacccaccttggaccagtccacggtgcatatcctcacacgcatctcccaggcgggctgtggggtctccatgatcttcctggccttcaccattattctttatgcctttctgaggctttcccgggagaggttcaagtcagaagatgccccaaagatccacgtggccctgggtggcagcctgttcctcctgaatctggccttcttggtcaatgtggggagtggctcaaaggggtctgatgctgcctgctgggcccggggggctgtcttccactacttcctgctctgtgccttcacctggatgggccttgaagccttccacctctacctgctcgctgtcagggtcttcaacacctacttcgggcactacttcctgaagctgagcctggtgggctggggcctgcccgccctgatggtcatcggcactgggagtgccaacagctacggcctctacaccatccgtgatagggagaaccgcacctctctggagctatgctggttccgtgaagggacaaccatgtacgccctctatatcaccgtccacggctacttcctcatcaccttcctctttggcatggtggtcctggccctggtggtctggaagatcttcaccctgtcccgtgctacagcggtcaaggagcgggggaagaaccggaagaaggtgctcaccctgctgggcctctcgagccttgcaagttgggtgtccatcgtccatctctggtccaatcagctgcgaccagaagggcagaatcatgtgatatga

SEQ ID NO: 69 - protein, 359 aa, Homo sapiens
MAPSAAWPPRSPLSQGPRLGLGDGSGVLNNRLVGLSVGQMHVTKLAEPLEIVFSHQRPPPNMTLTCVFWDVTKGTTGDWSSEGCSTEVRPEGTVCCCDHLTFFALLLRPTLDQSTVHILTRISQAGCGVSMIFLAFTIILYAFLRLSRERFKSEDAPKIHVALGGSLFLLNLAFLVNVGSGSKGSDAACWARGAVFHYFLLCAFTWMGLEAFHLYLLAVRVFNTYFGHYFLKLSLVGWGLPALMVIGTGSANSYGLYTIRDRENRTSLELCWFREGTTMYALYITVHGYFLITFLFGMVVLALVVWKIFTLSRATAVKERGKNRKKVLTLLGLSSLASWVSIVHLWSNQLRPEGQNHVI

SEQ ID NO: 70 - DNA, 702 bp, Homo sapiens
  CDS (1)...(702)
atgggagctccccatgggagctgtggccccttggggcctcttatttctcaccccaggctttcccgggagaggttcaagtcagaagatgccccaaagatccacgtggccctgggtggcagcctgttcctcctgaatctggccttcttggtcaatgtggggagtggctcaaaggggtctgatgctgcctgctgggcccggggggctgtcttccactacttcctgctctgtgccttcacctggatgggccttgaagccttccacctctacctgctcgctgtcagggtcttcaacacctacttcgggcactacttcctgaagctgagcctggtgggctggggcctgcccgccctgatggtcatcggcactgggagtgccaacagctacggcctctacaccatccgtgatagggagaaccgcacctctctggagctatgctggttccgtgaagggacaaccatgtacgccctctatatcaccgtccacggctacttcctcatcaccttcctctttggcatggtggtcctggccctggtggtctggaagatcttcaccctgtcccgtgctacagcggtcaaggagcgggggaagaaccggaagaaggtgctcaccctgctgggcctctcgagccttgcaagttgggtgtccatcgtccatctctggtccaatcagctgcgaccagaagggcagaatcatgtgatatga

SEQ ID NO: 71 - protein, 233 aa, Homo sapiens
MGAPHGSCGPLGPLISHPRLSRERFKSEDAPKIHVALGGSLFLLNLAFLVNVGSGSKGSDAACWARGAVFHYFLLCAFTWMGLEAFHLYLLAVRVFNTYFGHYFLKLSLVGWGLPALMVIGTGSANSYGLYTIRDRENRTSLELCWFREGTTMYALYITVHGYFLITFLFGMVVLALVVWKIFTLSRATAVKERGKNRKKVLTLLGLSSLASWVSIVHLWSNQLRPEGQNHVI

SEQ ID NO: 72 - DNA, 489 bp, Homo sapiens
  CDS (1)...(489)
atggggcaaatgaaacatgtctttgaggtcactttggcattaaagagacaccagactggagccaggtggcggcccctcccacagcgggagagccagggattgatgggtggaaatgggagaggcaccttcacagacagaaaagctcagccaggggacttcctgggtttgctggccagaggtaccactcccagtcccaccacagctgccccctcctccagatgctggttccgtgaagggacaaccatgtacgccctctatatcaccgtccacggctacttcctcatcaccttcctctttggcatggtggtcctggccctggtggtctggaagatcttcaccctgtcccgtgctacagcggtcaaggagcgggggaagaaccggaagaaggtgctcaccctgctgggcctctcgagccttgcaagttgggtgtccatcgtccatctctggtccaatcagctgcgaccagaagggcagaatcatgtgatatga

SEQ ID NO: 73 - protein, 162 aa, Homo sapiens
MGQMKHVFEVTLALKRHQTGARWRPLPQRESQGLMGGNGRGTFTDRKAQPGDFLGLLARGTTPSPTTAAPSSRCWFREGTTMYALYITVHGYFLITFLFGMVVLALVVWKIFTLSRATAVKERGKNRKKVLTLLGLSSLASWVSIVHLWSNQLRPEGQNHVI

SEQ ID NO: 74 - DNA, 1515 bp, Homo sapiens
  CDS (1)...(1515)
atggcgacgcccaggggcctgggggccctgctcctgctcctcctgctcccgacctcaggtcaggaaaagcccaccgaagggccaagaaacacctgcctggggagcaacaacatgtacgacatcttcaacttgaatgacaaggctttgtgcttcaccaagtgcaggcagtcgggcagcgactcctgcaatgtggaaaacttgcagagatactggctaaactacgaggcccatctgatgaaggaaggtttgacgcagaaggtgaacacgcctttcctgaaggctttggtccagaacctcagcaccaacactgcagaagacttctatttctctctggagccctctcaggttccgaggcaggtgatgaaggacgaggacaagccccctgacagagtgcgacttcccaagagcctttttcgatccctgccaggcaacaggtctgtggtccgcttggccgtcaccattctggacattggtccagggactctcttcaagggcccccggctcggcctgggagatggcagcggcgtgttgaacaatcgcctggtgggtttgagtgtgggacaaatgcatgtcaccaagctggctgagcctctggagatcgtcttctctcaccagcgaccgccccctaacatgaccctcacctgtgtattctgggatgtgactaaagggaccactggagactggtcttctgagggctgctccacggaggtcagacctgaggggaccgtgtgctgctgtgaccacctgacctttttcgccctgctcctgagacccaccttggaccagtccacggtgcatatcctcacacgcatctcccaggcgggctgtggggtctccatgatcttcctggccttcaccattattctttatgcctttctgaggctttcccgggagaggttcaagtcagaagatgccccaaagatccacgtggccctgggtggcagcctgttcctcctgaatctggccttcttggtcaatgtggggagtggctcaaaggggtctgatgctgcctgctgggcccggggggctgtcttccactacttcctgctctgtgccttcacctggatgggccttgaagccttccacctctacctgctcgctgtcagggtcttcaacacctacttcgggcactacttcctgaagctgagcctggtgggctggggcctgcccgccctgatggtcatcggcactgggagtgccaacagctacggcctctacaccatccgtgatagggagaaccgcacctctctggagctatgctggttccgtgaagggacaaccatgtacgccctctatatcaccgtccacggctacttcctcatcaccttcctctttggcatggtggtcctggccctggtggtctggaagatcttcaccctgtcccgtgctacagcggtcaaggagcgggggaagaaccggtgctcaccctgctgggcctctcgagccttgcaagttgggtgtccatcgtccatctctggtccaatcagctgcgaccagaagggcagaatcatgtga

SEQ ID NO: 75 - protein, 504 aa, Homo sapiens
MATPRGLGALLLLLLLPTSGQEKPTEGPRNTCLGSNNMYDIFNLNDKALCFTKCRQSGSDSCNVENLQRYWLNYEAHLMKEGLTQKVNTPFLKALVQNLSTNTAEDFYFSLEPSQVPRQVMKDEDKPPDRVRLPKSLFRSLPGNRSVVRLAVTILDIGPGTLFKGPRLGLGDGSGVLNNRLVGLSVGQMHVTKLAEPLEIVFSHQRPPPNMTLTCVFWDVTKGTTGDWSSEGCSTEVRPEGTVCCCDHLTFFALLLRPTLDQSTVHILTRISQAGCGVSMIFLAFTIILYAFLRLSRERFKSEDAPKIHVALGGSLFLLNLAFLVNVGSGSKGSDAACWARGAVFHYFLLCAFTWMGLEAFHLYLLAVRVFNTYFGHYFLKLSLVGWGLPALMVIGTGSANSYGLYTIRDRENRTSLELCWFREGTTMYALYITVHGYFLITFLFGMVVLALVVWKIFTLSRATAVKERGKNRCSPCWASRALQVGCPSSISGPISCDQKGRIM

SEQ ID NO: 76 - DNA, 885 bp, Homo sapiens
  CDS (1)...(885)
atgaccctcacctgtgtattctgggatgtgactaaagggaccactggagactggtcttctgagggctgctccacggaggtcagacctgaggggaccgtgtgctgctgtgaccacctgacctttttcgccctgctcctgagacccaccttggaccagtccacggtgcatatcctcacacgcatctcccaggcgggctgtggggtctccatgatcttcctggccttcaccattattctttatgcctttctgaggctttcccgggagaggttcaagtcagaagatgccccaaagatccacgtggccctgggtggcagcctgttcctcctgaatctggccttcttggtcaatgtggggagtggctcaaaggggtctgatgctgcctgctgggcccggggggctgtcttccactacttcctgctctgtgccttcacctggatgggccttgaagccttccacctctacctgctcgctgtcagggtcttcaacacctacttcgggcactacttcctgaagctgagcctggtgggctggggcctgcccgccctgatggtcatcggcactgggagtgccaacagctacggcctctacaccatccgtgatagggagaaccgcacctctctggagctatgctggttccgtgaagggacaaccatgtacgccctctatatcaccgtccacggctacttcctcatcaccttcctctttggcatggtggtcctggccctggtggtctggaagatcttcaccctgtcccgtgctacagcggtcaaggagcgggggaagaaccggtgctcaccctgctgggcctctcgagccttgcaagttgggtgtccatcgtccatctctggtccaatcagctgcgaccagaagggcagaatcatgtga

SEQ ID NO: 77 - protein, 294 aa, Homo sapiens
MTLTCVFWDVTKGTTGDWSSEGCSTEVRPEGTVCCCDHLTFFALLLRPTLDQSTVHILTRISQAGCGVSMIFLAFTIILYAFLRLSRERFKSEDAPKIHVALGGSLFLLNLAFLVNVGSGSKGSDAACWARGAVFHYFLLCAFTWMGLEAFHLYLLAVRVFNTYFGHYFLKLSLVGWGLPALMVIGTGSANSYGLYTIRDRENRTSLELCWFREGTTMYALYITVHGYFLITFLFGMVVLALVVWKIFTLSRATAVKERGKNRCSPCWASRALQVGCPSSISGPISCDQKGRIM

SEQ ID NO: 78 - DNA, 1068 bp, Homo sapiens
  CDS (1)...(1068)
atggccccttctgcagcctggcctccccgatctcccctttcacagggcccccggctcggcctgggagatggcagcggcgtgttgaacaatcgcctggtgggtttgagtgtgggacaaatgcatgtcaccaagctggctgagcctctggagatcgtcttctctcaccagcgaccgccccctaacatgaccctcacctgtgtattctgggatgtgactaaagggaccactggagactggtcttctgagggctgctccacggaggtcagacctgaggggaccgtgtgctgctgtgaccacctgacctttttcgccctgctcctgagacccaccttggaccagtccacggtgcatatcctcacacgcatctcccaggcgggctgtggggtctccatgatcttcctggccttcaccattattctttatgcctttctgaggctttcccgggagaggttcaagtcagaagatgccccaaagatccacgtggccctgggtggcagcctgttcctcctgaatctggccttcttggtcaatgtggggagtggctcaaaggggtctgatgctgcctgctgggcccggggggctgtcttccactacttcctgctctgtgccttcacctggatgggccttgaagccttccacctctacctgctcgctgtcagggtcttcaacacctacttcgggcactacttcctgaagctgagcctggtgggctggggcctgcccgccctgatggtcatcggcactgggagtgccaacagctacggcctctacaccatccgtgatagggagaaccgcacctctctggagctatgctggttccgtgaagggacaaccatgtacgccctctatatcaccgtccacggctacttcctcatcaccttcctctttggcatggtggtcctggccctggtggtctggaagatcttcaccctgtcccgtgctacagcggtcaaggagcgggggaagaaccggtgctcaccctgctgggcctctcgagccttgcaagttgggtgtccatcgtccatctctggtccaatcagctgcgaccagaagggcagaatcatgtga

SEQ ID NO: 79 - protein, 355 aa, Homo sapiens
MAPSAAWPPRSPLSQGPRLGLGDGSGVLNNRLVGLSVGQMHVTKLAEPLEIVFSHQRPPPNMTLTCVFWDVTKGTTGDWSSEGCSTEVRPEGTVCCCDHLTFFALLLRPTLDQSTVHILTRISQAGCGVSMIFLAFTIILYAFLRLSRERFKSEDAPKIHVALGGSLFLLNLAFLVNVGSGSKGSDAACWARGAVFHYFLLCAFTWMGLEAFHLYLLAVRVFNTYFGHYFLKLSLVGWGLPALMVIGTGSANSYGLYTIRDRENRTSLELCWFREGTTMYALYITVHGYFLITFLFGMVVLALVVWKIFTLSRATAVKERGKNRCSPCWASRALQVGCPSSISGPISCDQKGRIM

SEQ ID NO: 80 - DNA, 690 bp, Homo sapiens
  CDS (1)...(690)
atgggagctccccatgggagctgtggccccttggggcctcttatttctcaccccaggctttcccgggagaggttcaagtcagaagatgccccaaagatccacgtggccctgggtggcagcctgttcctcctgaatctggccttcttggtcaatgtggggagtggctcaaaggggtctgatgctgcctgctgggcccggggggctgtcttccactacttcctgctctgtgccttcacctggatgggccttgaagccttccacctctacctgctcgctgtcagggtcttcaacacctacttcgggcactacttcctgaagctgagcctggtgggctggggcctgcccgccctgatggtcatcggcactgggagtgccaacagctacggcctctacaccatccgtgatagggagaaccgcacctctctggagctatgctggttccgtgaagggacaaccatgtacgccctctatatcaccgtccacggctacttcctcatcaccttcctctttggcatggtggtcctggccctggtggtctggaagatcttcaccctgtcccgtgctacagcggtcaaggagcgggggaagaaccggtgctcaccctgctgggcctctcgagccttgcaagttgggtgtccatcgtccatctctggtccaatcagctgcgaccagaagggcagaatcatgtga

SEQ ID NO: 81 - protein, 229 aa, Homo sapiens
MGAPHGSCGPLGPLISHPRLSRERFKSEDAPKIHVALGGSLFLLNLAFLVNVGSGSKGSDAACWARGAVFHYFLLCAFTWMGLEAFHLYLLAVRVFNTYFGHYFLKLSLVGWGLPALMVIGTGSANSYGLYTIRDRENRTSLELCWFREGTTMYALYITVHGYFLITFLFGMVVLALVVWKIFTLSRATAVKERGKNRCSPCWASRALQVGCPSSISGPISCDQKGRIM

SEQ ID NO: 82 - DNA, 477 bp, Homo sapiens
  CDS (1)...(477)
atggggcaaatgaaacatgtctttgaggtcactttggcattaaagagacaccagactggagccaggtggcggcccctcccacagcgggagagccagggattgatgggtggaaatgggagaggcaccttcacagacagaaaagctcagccaggggacttcctgggtttgctggccagaggtaccactcccagtcccaccacagctgccccctcctccagatgctggttccgtgaagggacaaccatgtacgccctctatatcaccgtccacggctacttcctcatcaccttcctctttggcatggtggtcctggccctggtggtctggaagatcttcaccctgtcccgtgctacagcggtcaaggagcgggggaagaaccggtgctcaccctgctgggcctctcgagccttgcaagttgggtgtccatcgtccatctctggtccaatcagctgcgaccagaagggcagaatcatgtga

SEQ ID NO: 83 - protein, 158 aa, Homo sapiens
MGQMKHVFEVTLALKRHQTGARWRPLPQRESQGLMGGNGRGTFTDRKAQPGDFLGLLARGTTPSPTTAAPSSRCWFREGTTMYALYITVHGYFLITFLFGMVVLALVVWKIFTLSRATAVKERGKNRCSPCWASRALQVGCPSSISGPISCDQKGRIM

SEQ ID NO: 84 - DNA, 1566 bp, Homo sapiens
  CDS (1)...(1566)
atggcgacgcccaggggcctgggggccctgctcctgctcctcctgctcccgacctcaggtcaggaaaagcccaccgaagggccaagaaacacctgcctggggagcaacaacatgtacgacatcttcaacttgaatgacaaggctttgtgcttcaccaagtgcaggcagtcgggcagcgactcctgcaatgtggaaaacttgcagagatactggctaaactacgaggcccatctgatgaaggaaggtttgacgcagaaggtgaacacgcctttcctgaaggctttggtccagaacctcagcaccaacactgcagaagacttctatttctctctggagccctctcaggttccgaggcaggtgatgaaggacgaggacaagccccctgacagagtgcgacttcccaagagcctttttcgatccctgccaggcaacaggtctgtggtccgcttggccgtcaccattctggacattggtccagggactctcttcaagggcccccggctcggcctgggagatggcagcggcgtgttgaacaatcgcctggtgggtttgagtgtgggacaaatgcatgtcaccaagctggctgagcctctggagatcgtcttctctcaccagcgaccgccccctaacatgaccctcacctgtgtattctgggatgtgactaaagggaccactggagactggtcttctgagggctgctccacggaggtcagacctgaggggaccgtgtgctgctgtgaccacctgacctttttcgccctgctcctgagacccaccttggaccagtccacggtgcatatcctcacacgcatctcccaggcgggctgtggggtctccatgatcttcctggccttcaccattattctttatgcctttctgaggctttcccgggagaggttcaagtcagaagatgccccaaagatccacgtggccctgggtggcagcctgttcctcctgaatctggccttcttggtcaatgtggggagtggctcaaaggggtctgatgctgcctgctgggcccggggggctgtcttccactacttcctgctctgtgccttcacctggatgggccttgaagccttccacctctacctgctcgctgtcagggtcttcaacacctacttcgggcactacttcctgaagctgagcctggtgggctggggcctgcccgccctgatggtcatcggcactgggagtgccaacagctacggcctctacaccatccgtgatagggagaaccgcacctctctggagctatgctggttccgtgaagggacaaccatgtacgccctctatatcaccgtccacggctacttcctcatcaccttcctctttggcatggtggtcctggccctggtggtctggaagatcttcaccctgtcccgtgctacagcggtcaaggagcgggggaagaaccggaagaaggtgctcaccctgctgggcctctcgagcctggtgggtgtgacatgggggttggccatcttcaccccgttgggcctctccaccgtctacatctttgcacttttcaactccttgcaaggtgaggcccctgcaccagggaggtga

SEQ ID NO: 85 - protein, 521 aa, Homo sapiens
MATPRGLGALLLLLLLPTSGQEKPTEGPRNTCLGSNNMYDIFNLNDKALCFTKCRQSGSDSCNVENLQRYWLNYEAHLMKEGLTQKVNTPFLKALVQNLSTNTAEDFYFSLEPSQVPRQVMKDEDKPPDRVRLPKSLFRSLPGNRSVVRLAVTILDIGPGTLFKGPRLGLGDGSGVLNNRLVGLSVGQMHVTKLAEPLEIVFSHQRPPPNMTLTCVFWDVTKGTTGDWSSEGCSTEVRPEGTVCCCDHLTFFALLLRPTLDQSTVHILTRISQAGCGVSMIFLAFTIILYAFLRLSRERFKSEDAPKIHVALGGSLFLLNLAFLVNVGSGSKGSDAACWARGAVFHYFLLCAFTWMGLEAFHLYLLAVRVFNTYFGHYFLKLSLVGWGLPALMVIGTGSANSYGLYTIRDRENRTSLELCWFREGTTMYALYITVHGYFLITFLFGMVVLALVVWKIFTLSRATAVKERGKNRKKVLTLLGLSSLVGVTWGLAIFTPLGLSTVYIFALFNSLQGEAPAPGR

SEQ ID NO: 86 - DNA, 936 bp, Homo sapiens
  CDS (1)...(936)
atgaccctcacctgtgtattctgggatgtgactaaagggaccactggagactggtcttctgagggctgctccacggaggtcagacctgaggggaccgtgtgctgctgtgaccacctgacctttttcgccctgctcctgagacccaccttggaccagtccacggtgcatatcctcacacgcatctcccaggcgggctgtggggtctccatgatcttcctggccttcaccattattctttatgcctttctgaggctttcccgggagaggttcaagtcagaagatgccccaaagatccacgtggccctgggtggcagcctgttcctcctgaatctggccttcttggtcaatgtggggagtggctcaaaggggtctgatgctgcctgctgggcccggggggctgtcttccactacttcctgctctgtgccttcacctggatgggccttgaagccttccacctctacctgctcgctgtcagggtcttcaacacctacttcgggcactacttcctgaagctgagcctggtgggctggggcctgcccgccctgatggtcatcggcactgggagtgccaacagctacggcctctacaccatccgtgatagggagaaccgcacctctctggagctatgctggttccgtgaagggacaaccatgtacgccctctatatcaccgtccacggctacttcctcatcaccttcctctttggcatggtggtcctggccctggtggtctggaagatcttcaccctgtcccgtgctacagcggtcaaggagcgggggaagaaccggaagaaggtgctcaccctgctgggcctctcgagcctggtgggtgtgacatgggggttggccatcttcaccccgttgggcctctccaccgtctacatctttgcacttttcaactccttgcaaggtgaggcccctgcaccagggaggtga

SEQ ID NO: 87 - protein, 311 aa, Homo sapiens
MTLTCVFWDVTKGTTGDWSSEGCSTEVRPEGTVCCCDHLTFFALLLRPTLDQSTVHILTRISQAGCGVSMIFLAFTIILYAFLRLSRERFKSEDAPKIHVALGGSLFLLNLAFLVNVGSGSKGSDAACWARGAVFHYFLLCAFTWMGLEAFHLYLLAVRVFNTYFGHYFLKLSLVGWGLPALMVIGTGSANSYGLYTIRDRENRTSLELCWFREGTTMYALYITVHGYFLITFLFGMVVLALVVWKIFTLSRATAVKERGKNRKKVLTLLGLSSLVGVTWGLAIFTPLGLSTVYIFALFNSLQGEAPAPGR

SEQ ID NO: 88 - DNA, 1119 bp, Homo sapiens
  CDS (1)...(1119)
atggccccttctgcagcctggcctccccgatctcccctttcacagggcccccggctcggcctgggagatggcagcggcgtgttgaacaatcgcctggtgggtttgagtgtgggacaaatgcatgtcaccaagctggctgagcctctggagatcgtcttctctcaccagcgaccgccccctaacatgaccctcacctgtgtattctgggatgtgactaaagggaccactggagactggtcttctgagggctgctccacggaggtcagacctgaggggaccgtgtgctgctgtgaccacctgacctttttcgccctgctcctgagacccaccttggaccagtccacggtgcatatcctcacacgcatctcccaggcgggctgtggggtctccatgatcttcctggccttcaccattattctttatgcctttctgaggctttcccgggagaggttcaagtcagaagatgccccaaagatccacgtggccctgggtggcagcctgttcctcctgaatctggccttcttggtcaatgtggggagtggctcaaaggggtctgatgctgcctgctgggcccggggggctgtcttccactacttcctgctctgtgccttcacctggatgggccttgaagccttccacctctacctgctcgctgtcagggtcttcaacacctacttcgggcactacttcctgaagctgagcctggtgggctggggcctgcccgccctgatggtcatcggcactgggagtgccaacagctacggcctctacaccatccgtgatagggagaaccgcacctctctggagctatgctggttccgtgaagggacaaccatgtacgccctctatatcaccgtccacggctacttcctcatcaccttcctctttggcatggtggtcctggccctggtggtctggaagatcttcaccctgtcccgtgctacagcggtcaaggagcgggggaagaaccggaagaaggtgctcaccctgctgggcctctcgagcctggtgggtgtgacatgggggttggccatcttcaccccgttgggcctctccaccgtctacatctttgcacttttcaactccttgcaaggtgaggcccctgcaccagggaggtga

SEQ ID NO: 89 - protein, 372 aa, Homo sapiens
MAPSAAWPPRSPLSQGPRLGLGDGSGVLNNRLVGLSVGQMHVTKLAEPLEIVFSHQRPPPNMTLTCVFWDVTKGTTGDWSSEGCSTEVRPEGTVCCCDHLTFFALLLRPTLDQSTVHILTRISQAGCGVSMIFLAFTIILYAFLRLSRERFKSEDAPKIHVALGGSLFLLNLAFLVNVGSGSKGSDAACWARGAVFHYFLLCAFTWMGLEAFHLYLLAVRVFNTYFGHYFLKLSLVGWGLPALMVIGTGSANSYGLYTIRDRENRTSLELCWFREGTTMYALYITVHGYFLITFLFGMVVLALVVWKIFTLSRATAVKERGKNRKKVLTLLGLSSLVGVTWGLAIFTPLGLSTVYIFALFNSLQGEAPAPGR

SEQ ID NO: 90 - DNA, 741 bp, Homo sapiens
  CDS (1)...(741)
atgggagctccccatgggagctgtggccccttggggcctcttatttctcaccccaggctttcccgggagaggttcaagtcagaagatgccccaaagatccacgtggccctgggtggcagcctgttcctcctgaatctggccttcttggtcaatgtggggagtggctcaaaggggtctgatgctgcctgctgggcccggggggctgtcttccactacttcctgctctgtgccttcacctggatgggccttgaagccttccacctctacctgctcgctgtcagggtcttcaacacctacttcgggcactacttcctgaagctgagcctggtgggctggggcctgcccgccctgatggtcatcggcactgggagtgccaacagctacggcctctacaccatccgtgatagggagaaccgcacctctctggagctatgctggttccgtgaagggacaaccatgtacgccctctatatcaccgtccacggctacttcctcatcaccttcctctttggcatggtggtcctggccctggtggtctggaagatcttcaccctgtcccgtgctacagcggtcaaggagcgggggaagaaccggaagaaggtgctcaccctgctgggcctctcgagcctggtgggtgtgacatgggggttggccatcttcaccccgttgggcctctccaccgtctacatctttgcacttttcaactccttgcaaggtgaggcccctgcaccagggaggtga

SEQ ID NO: 91 - protein, 246 aa, Homo sapiens [sequence omitted]

SEQ ID NO: 92 - DNA, 528 bp, Homo sapiens
  CDS (1)...(528)
atggggcaaatgaaacatgtctttgaggtcactttggcattaaagagacaccagactggagccaggtggcggcccctcccacagcgggagagccagggattgatgggtggaaatgggagaggcaccttcacagacagaaaagctcagccaggggacttcctgggtttgctggccagaggtaccactcccagtcccaccacagctgccccctcctccagatgctggttccgtgaagggacaaccatgtacgccctctatatcaccgtccacggctacttcctcatcaccttcctctttggcatggtggtcctggccctggtggtctggaagatcttcaccctgtcccgtgctacagcggtcaaggagcgggggaagaaccggaagaaggtgctcaccctgctgggcctctcgagcctggtgggtgtgacatgggggttggccatcttcaccccgttgggcctctccaccgtctacatctttgcacttttcaactccttgcaaggtgaggcccctgcaccagggaggtga

SEQ ID NO: 93 - protein, 175 aa, Homo sapiens
MGQMKHVFEVTLALKRHQTGARWRPLPQRESQGLMGGNGRGTFTDRKAQPGDFLGLLARGTTPSPTTAAPSSRCWFREGTTMYALYITVHGYFLITFLFGMVVLALVVWKIFTLSRATAVKERGKNRKKVLTLLGLSSLVGVTWGLAIFTPLGLSTVYIFALFNSLQGEAPAPGR

SEQ ID NO: 94 - DNA, 1458 bp, Homo sapiens
  CDS (1)...(1458)
atggcgacgcccaggggcctgggggccctgctcctgctcctcctgctcccgacctcaggtcaggaaaagcccaccgaagggccaagaaacacctgcctggggagcaacaacatgtacgacatcttcaacttgaatgacaaggctttgtgcttcaccaagtgcaggcagtcgggcagcgactcctgcaatgtggaaaacttgcagagatactggctaaactacgaggcccatctgatgaaggaaggtttgacgcagaaggtgaacacgcctttcctgaaggctttggtccagaacctcagcaccaacactgcagaagacttctatttctctctggagccctctcaggttccgaggcaggtgatgaaggacgaggacaagccccctgacagagtgcgacttcccaagagcctttttcgatccctgccaggcaacaggtctgtggtccgcttggccgtcaccattctggacattggtccagggactctcttcaagggcccccggctcggcctgggagatggcagcggcgtgttgaacaatcgcctggtgggtttgagtgtgggacaaatgcatgtcaccaagctggctgagcctctggagatcgtcttctctcaccagcgaccgccccctaacatgaccctcacctgtgtattctgggatgtgactaaagggaccactggagactggtcttctgagggctgctccacggaggtcagacctgaggggaccgtgtgctgctgtgaccacctgacctttttcgccctgctcctgagacccaccttggaccagtccacggtgcatatcctcacacgcatctcccaggcgggctgtggggtctccatgatcttcctggccttcaccattattctttatgcctttctgaggctttcccgggagaggttcaagtcagaagatgccccaaagatccacgtggccctgggtggcagcctgttcctcctgaatctggccttcttggtcaatgtggggagtggctcaaaggggtctgatgctgcctgctgggcccggggggctgtcttccactacttcctgctctgtgccttcacctggatgggccttgaagccttccacctctacctgctcgctgtcagggtcttcaacacctacttcgggcactacttcctgaagctgagcctggtgggctggggcctgcccgccctgatggtcatcggcactgggagtgccaacagctacggcctctacaccatccgtgatagggagaaccgcacctctctggagctatgctggttccgtgaagggacaaccatgtacgccctctatatcaccgtccacggctacttcctcatcaccttcctctttggcatggtggtcctggccctggtggtctggaagatcttcaccctgtcccgtgctacagcggtcaaggagcgggggaagaaccggtgctcaccctgctgggcctctcgagcctggtgggtgtga

SEQ ID NO: 95 - protein, 485 aa, Homo sapiens
MATPRGLGALLLLLLLPTSGQEKPTEGPRNTCLGSNNMYDIFNLNDKALCFTKCRQSGSDSCNVENLQRYWLNYEAHLMKEGLTQKVNTPFLKALVQNLSTNTAEDFYFSLEPSQVPRQVMKDEDKPPDRVRLPKSLFRSLPGNRSVVRLAVTILDIGPGTLFKGPRLGLGDGSGVLNNRLVGLSVGQMHVTKLAEPLEIVFSHQRPPPNMTLTCVFWDVTKGTTGDWSSEGCSTEVRPEGTVCCCDHLTFFALLLRPTLDQSTVHILTRISQAGCGVSMIFLAFTIILYAFLRLSRERFKSEDAPKIHVALGGSLFLLNLAFLVNVGSGSKGSDAACWARGAVFHYFLLCAFTWMGLEAFHLYLLAVRVFNTYFGHYFLKLSLVGWGLPALMVIGTGSANSYGLYTIRDRENRTSLELCWFREGTTMYALYITVHGYFLITFLFGMVVLALVVWKIFTLSRATAVKERGKNRCSPCWASRAWWV

SEQ ID NO: 96 - DNA, 828 bp, Homo sapiens
  CDS (1)...(828)
atgaccctcacctgtgtattctgggatgtgactaaagggaccactggagactggtcttctgagggctgctccacggaggtcagacctgaggggaccgtgtgctgctgtgaccacctgacctttttcgccctgctcctgagacccaccttggaccagtccacggtgcatatcctcacacgcatctcccaggcgggctgtggggtctccatgatcttcctggccttcaccattattctttatgcctttctgaggctttcccgggagaggttcaagtcagaagatgccccaaagatccacgtggccctgggtggcagcctgttcctcctgaatctggccttcttggtcaatgtggggagtggctcaaaggggtctgatgctgcctgctgggcccggggggctgtcttccactacttcctgctctgtgccttcacctggatgggccttgaagccttccacctctacctgctcgctgtcagggtcttcaacacctacttcgggcactacttcctgaagctgagcctggtgggctggggcctgcccgccctgatggtcatcggcactgggagtgccaacagctacggcctctacaccatccgtgatagggagaaccgcacctctctggagctatgctggttccgtgaagggacaaccatgtacgccctctatatcaccgtccacggctacttcctcatcaccttcctctttggcatggtggtcctggccctggtggtctggaagatcttcaccctgtcccgtgctacagcggtcaaggagcgggggaagaaccggtgctcaccctgctgggcctctcgagcctggtgggtgtga

SEQ ID NO: 97 - protein, 275 aa, Homo sapiens
MTLTCVFWDVTKGTTGDWSSEGCSTEVRPEGTVCCCDHLTFFALLLRPTLDQSTVHILTRISQAGCGVSMIFLAFTIILYAFLRLSRERFKSEDAPKIHVALGGSLFLLNLAFLVNVGSGSKGSDAACWARGAVFHYFLLCAFTWMGLEAFHLYLLAVRVFNTYFGHYFLKLSLVGWGLPALMVIGTGSANSYGLYTIRDRENRTSLELCWFREGTTMYALYITVHGYFLITFLFGMVVLALVVWKIFTLSRATAVKERGKNRCSPCWASRAWWV

SEQ ID NO: 98 - DNA, 1011 bp, Homo sapiens
  CDS (1)...(1011)
atggccccttctgcagcctggcctccccgatctcccctttcacagggcccccggctcggcctgggagatggcagcggcgtgttgaacaatcgcctggtgggtttgagtgtgggacaaatgcatgtcaccaagctggctgagcctctggagatcgtcttctctcaccagcgaccgccccctaacatgaccctcacctgtgtattctgggatgtgactaaagggaccactggagactggtcttctgagggctgctccacggaggtcagacctgaggggaccgtgtgctgctgtgaccacctgacctttttcgccctgctcctgagacccaccttggaccagtccacggtgcatatcctcacacgcatctcccaggcgggctgtggggtctccatgatcttcctggccttcaccattattctttatgcctttctgaggctttcccgggagaggttcaagtcagaagatgccccaaagatccacgtggccctgggtggcagcctgttcctcctgaatctggccttcttggtcaatgtggggagtggctcaaaggggtctgatgctgcctgctgggcccggggggctgtcttccactacttcctgctctgtgccttcacctggatgggccttgaagccttccacctctacctgctcgctgtcagggtcttcaacacctacttcgggcactacttcctgaagctgagcctggtgggctggggcctgcccgccctgatggtcatcggcactgggagtgccaacagctacggcctctacaccatccgtgatagggagaaccgcacctctctggagctatgctggttccgtgaagggacaaccatgtacgccctctatatcaccgtccacggctacttcctcatcaccttcctctttggcatggtggtcctggccctggtggtctggaagatcttcaccctgtcccgtgctacagcggtcaaggagcgggggaagaaccggtgctcaccctgctgggcctctcgagcctggtgggtgtga

SEQ ID NO: 99 - protein, 336 aa, Homo sapiens
MAPSAAWPPRSPLSQGPRLGLGDGSGVLNNRLVGLSVGQMHVTKLAEPLEIVFSHQRPPPNMTLTCVFWDVTKGTTGDWSSEGCSTEVRPEGTVCCCDHLTFFALLLRPTLDQSTVHILTRISQAGCGVSMIFLAFTIILYAFLRLSRERFKSEDAPKIHVALGGSLFLLNLAFLVNVGSGSKGSDAACWARGAVFHYFLLCAFTWMGLEAFHLYLLAVRVFNTYFGHYFLKLSLVGWGLPALMVIGTGSANSYGLYTIRDRENRTSLELCWFREGTTMYALYITVHGYFLITFLFGMVVLALVVWKIFTLSRATAVKERGKNRCSPCWASRAWWV

SEQ ID NO: 100 - DNA, 633 bp, Homo sapiens
  CDS (1)...(633)
atgggagctccccatgggagctgtggccccttggggcctcttatttctcaccccaggctttcccgggagaggttcaagtcagaagatgccccaaagatccacgtggccctgggtggcagcctgttcctcctgaatctggccttcttggtcaatgtggggagtggctcaaaggggtctgatgctgcctgctgggcccggggggctgtcttccactacttcctgctctgtgccttcacctggatgggccttgaagccttccacctctacctgctcgctgtcagggtcttcaacacctacttcgggcactacttcctgaagctgagcctggtgggctggggcctgcccgccctgatggtcatcggcactgggagtgccaacagctacggcctctacaccatccgtgatagggagaaccgcacctctctggagctatgctggttccgtgaagggacaaccatgtacgccctctatatcaccgtccacggctacttcctcatcaccttcctctttggcatggtggtcctggccctggtggtctggaagatcttcaccctgtcccgtgctacagcggtcaaggagcgggggaagaaccggtgctcaccctgctgggcctctcgagcctggtgggtgtga

SEQ ID NO: 101 - protein, 210 aa, Homo sapiens
MGAPHGSCGPLGPLISHPRLSRERFKSEDAPKIHVALGGSLFLLNLAFLVNVGSGSKGSDAACWARGAVFHYFLLCAFTWMGLEAFHLYLLAVRVFNTYFGHYFLKLSLVGWGLPALMVIGTGSANSYGLYTIRDRENRTSLELCWFREGTTMYALYITVHGYFLITFLFGMVVLALVVWKIFTLSRATAVKERGKNRCSPCWASRAWWV

SEQ ID NO: 102 - DNA, 420 bp, Homo sapiens
  CDS (1)...(420)
atggggcaaatgaaacatgtctttgaggtcactttggcattaaagagacaccagactggagccaggtggcggcccctcccacagcgggagagccagggattgatgggtggaaatgggagaggcaccttcacagacagaaaagctcagccaggggacttcctgggtttgctggccagaggtaccactcccagtcccaccacagctgccccctcctccagatgctggttccgtgaagggacaaccatgtacgccctctatatcaccgtccacggctacttcctcatcaccttcctctttggcatggtggtcctggccctggtggtctggaagatcttcaccctgtcccgtgctacagcggtcaaggagcgggggaagaaccggtgctcaccctgctgggcctctcgagcctggtgggtgtga

SEQ ID NO: 103 - protein, 139 aa, Homo sapiens
MGQMKHVFEVTLALKRHQTGARWRPLPQRESQGLMGGNGRGTFTDRKAQPGDFLGLLARGTTPSPTTAAPSSRCWFREGTTMYALYITVHGYFLITFLFGMVVLALVVWKIFTLSRATAVKERGKNRCSPCWASRAWWV

SEQ ID NO: 104 - DNA, 1650 bp, Homo sapiens
  CDS (1)...(1650)
atggcgacgcccaggggcctgggggccctgctcctgctcctcctgctcccgacctcaggtcaggaaaagcccaccgaagggccaagaaacacctgcctggggagcaacaacatgtacgacatcttcaacttgaatgacaaggctttgtgcttcaccaagtgcaggcagtcgggcagcgactcctgcaatgtggaaaacttgcagagatactggctaaactacgaggcccatctgatgaaggaaggtttgacgcagaaggtgaacacgcctttcctgaaggctttggtccagaacctcagcaccaacactgcagaagacttctatttctctctggagccctctcaggttccgaggcaggtgatgaaggacgaggacaagccccctgacagagtgcgacttcccaagagcctttttcgatccctgccaggcaacaggtctgtggtccgcttggccgtcaccattctggacattggtccagggactctcttcaagggcccccggctcggcctgggagatggcagcggcgtgttgaacaatcgcctggtgggtttgagtgtgggacaaatgcatgtcaccaagctggctgagcctctggagatcgtcttctctcaccagcgaccgccccctaacatgaccctcacctgtgtattctgggatgtgactaaagggaccactggagactggtcttctgagggctgctccacggaggtcagacctgaggggaccgtgtgctgctgtgaccacctgacctttttcgccctgctcctgagacccaccttggaccagtccacggtgcatatcctcacacgcatctcccaggcgggctgtggggtctccatgatcttcctggccttcaccattattctttatgcctttctgaggctttcccgggagaggttcaagtcagaagatgccccaaagatccacgtggccctgggtggcagcctgttcctcctgaatctggccttcttggtcaatgtggggagtggctcaaaggggtctgatgctgcctgctgggcccggggggctgtcttccactacttcctgctctgtgccttcacctggatgggccttgaagccttccacctctacctgctcgctgtcagggtcttcaacacctacttcgggcactacttcctgaagctgagcctggtgggctggggcctgcccgccctgatggtcatcggcactgggagtgccaacagctacggcctctacaccatccgtgatagggagaaccgcacctctctggagctatgctggttccgtgaagggacaaccatgtacgccctctatatcaccgtccacggctacttcctcatcaccttcctctttggcatggtggtcctggccctggtggtctggaagatcttcaccctgtcccgtgctacagcggtcaaggagcgggggaagaaccggaagaaggtgctcaccctgctgggcctctcgagcctggtgggtgtgacatgggggttggccatcttcaccccgttgggcctctccaccgtctacatctttgcacttttcaactccttgcaaggtgtcttcatctgctgctggttcaccatcctttacctcccaagtcagagcaccacagtctcctcctctactgcaagattggaccaggcccactccgcatctcaagaatag

SEQ ID NO: 105 - protein, 549 aa, Homo sapiens
MATPRGLGALLLLLLLPTSGQEKPTEGPRNTCLGSNNMYDIFNLNDKALCFTKCRQSGSDSCNVENLQRYWLNYEAHLMKEGLTQKVNTPFLKALVQNLSTNTAEDFYFSLEPSQVPRQVMKDEDKPPDRVRLPKSLFRSLPGNRSVVRLAVTILDIGPGTLFKGPRLGLGDGSGVLNNRLVGLSVGQMHVTKLAEPLEIVFSHQRPPPNMTLTCVFWDVTKGTTGDWSSEGCSTEVRPEGTVCCCDHLTFFALLLRPTLDQSTVHILTRISQAGCGVSMIFLAFTIILYAFLRLSRERFKSEDAPKIHVALGGSLFLLNLAFLVNVGSGSKGSDAACWARGAVFHYFLLCAFTWMGLEAFHLYLLAVRVFNTYFGHYFLKLSLVGWGLPALMVIGTGSANSYGLYTIRDRENRTSLELCWFREGTTMYALYITVHGYFLITFLFGMVVLALVVWKIFTLSRATAVKERGKNRKKVLTLLGLSSLVGVTWGLAIFTPLGLSTVYIFALFNSLQGVFICCWFTILYLPSQSTTVSSSTARLDQAHSASQE

SEQ ID NO: 106 - DNA, 1020 bp, Homo sapiens
  CDS (1)...(1020)
atgaccctcacctgtgtattctgggatgtgactaaagggaccactggagactggtcttctgagggctgctccacggaggtcagacctgaggggaccgtgtgctgctgtgaccacctgacctttttcgccctgctcctgagacccaccttggaccagtccacggtgcatatcctcacacgcatctcccaggcgggctgtggggtctccatgatcttcctggccttcaccattattctttatgcctttctgaggctttcccgggagaggttcaagtcagaagatgccccaaagatccacgtggccctgggtggcagcctgttcctcctgaatctggccttcttggtcaatgtggggagtggctcaaaggggtctgatgctgcctgctgggcccggggggctgtcttccactacttcctgctctgtgccttcacctggatgggccttgaagccttccacctctacctgctcgctgtcagggtcttcaacacctacttcgggcactacttcctgaagctgagcctggtgggctggggcctgcccgccctgatggtcatcggcactgggagtgccaacagctacggcctctacaccatccgtgatagggagaaccgcacctctctggagctatgctggttccgtgaagggacaaccatgtacgccctctatatcaccgtccacggctacttcctcatcaccttcctctttggcatggtggtcctggccctggtggtctggaagatcttcaccctgtcccgtgctacagcggtcaaggagcgggggaagaaccggaagaaggtgctcaccctgctgggcctctcgagcctggtgggtgtgacatgggggttggccatcttcaccccgttgggcctctccaccgtctacatctttgcacttttcaactccttgcaaggtgtcttcatctgctgctggttcaccatcctttacctcccaagtcagagcaccacagtctcctcctctactgcaagattggaccaggcccactccgcatctcaagaatag

SEQ ID NO: 107 - protein, 339 aa, Homo sapiens
MTLTCVFWDVTKGTTGDWSSEGCSTEVRPEGTVCCCDHLTFFALLLRPTLDQSTVHILTRISQAGCGVSMIFLAFTIILYAFLRLSRERFKSEDAPKIHVALGGSLFLLNLAFLVNVGSGSKGSDAACWARGAVFHYFLLCAFTWMGLEAFHLYLLAVRVFNTYFGHYFLKLSLVGWGLPALMVIGTGSANSYGLYTIRDRENRTSLELCWFREGTTMYALYITVHGYFLITFLFGMVVLALVVWKIFTLSRATAVKERGKNRKKVLTLLGLSSLVGVTWGLAIFTPLGLSTVYIFALFNSLQGVFICCWFTILYLPSQSTTVSSSTARLDQAHSASQE

SEQ ID NO: 108 - DNA, 1203 bp, Homo sapiens
  CDS (1)...(1203)
atggccccttctgcagcctggcctccccgatctcccctttcacagggcccccggctcggcctgggagatggcagcggcgtgttgaacaatcgcctggtgggtttgagtgtgggacaaatgcatgtcaccaagctggctgagcctctggagatcgtcttctctcaccagcgaccgccccctaacatgaccctcacctgtgtattctgggatgtgactaaagggaccactggagactggtcttctgagggctgctccacggaggtcagacctgaggggaccgtgtgctgctgtgaccacctgacctttttcgccctgctcctgagacccaccttggaccagtccacggtgcatatcctcacacgcatctcccaggcgggctgtggggtctccatgatcttcctggccttcaccattattctttatgcctttctgaggctttcccgggagaggttcaagtcagaagatgccccaaagatccacgtggccctgggtggcagcctgttcctcctgaatctggccttcttggtcaatgtggggagtggctcaaaggggtctgatgctgcctgctgggcccggggggctgtcttccactacttcctgctctgtgccttcacctggatgggccttgaagccttccacctctacctgctcgctgtcagggtcttcaacacctacttcgggcactacttcctgaagctgagcctggtgggctggggcctgcccgccctgatggtcatcggcactgggagtgccaacagctacggcctctacaccatccgtgatagggagaaccgcacctctctggagctatgctggttccgtgaagggacaaccatgtacgccctctatatcaccgtccacggctacttcctcatcaccttcctctttggcatggtggtcctggccctggtggtctggaagatcttcaccctgtcccgtgctacagcggtcaaggagcgggggaagaaccggaagaaggtgctcaccctgctgggcctctcgagcctggtgggtgtgacatgggggttggccatcttcaccccgttgggcctctccaccgtctacatctttgcacttttcaactccttgcaaggtgtcttcatctgctgctggttcaccatcctttacctcccaagtcagagcaccacagtctcctcctctactgcaagattggaccaggcccactccgcatctcaagaatag

SEQ ID NO: 109 - protein, 400 aa, Homo sapiens
MAPSAAWPPRSPLSQGPRLGLGDGSGVLNNRLVGLSVGQMHVTKLAEPLEIVFSHQRPPPNMTLTCVFWDVTKGTTGDWSSEGCSTEVRPEGTVCCCDHLTFFALLLRPTLDQSTVHILTRISQAGCGVSMIFLAFTIILYAFLRLSRERFKSEDAPKIHVALGGSLFLLNLAFLVNVGSGSKGSDAACWARGAVFHYFLLCAFTWMGLEAFHLYLLAVRVFNTYFGHYFLKLSLVGWGLPALMVIGTGSANSYGLYTIRDRENRTSLELCWFREGTTMYALYITVHGYFLITFLFGMVVLALVVWKIFTLSRATAVKERGKNRKKVLTLLGLSSLVGVTWGLAIFTPLGLSTVYIFALFNSLQGVFICCWFTILYLPSQSTTVSSSTARLDQAHSASQE

SEQ ID NO: 110 - DNA, 825 bp, Homo sapiens
  CDS (1)...(825)
atgggagctccccatgggagctgtggccccttggggcctcttatttctcaccccaggctttcccgggagaggttcaagtcagaagatgccccaaagatccacgtggccctgggtggcagcctgttcctcctgaatctggccttcttggtcaatgtggggagtggctcaaaggggtctgatgctgcctgctgggcccggggggctgtcttccactacttcctgctctgtgccttcacctggatgggccttgaagccttccacctctacctgctcgctgtcagggtcttcaacacctacttcgggcactacttcctgaagctgagcctggtgggctggggcctgcccgccctgatggtcatcggcactgggagtgccaacagctacggcctctacaccatccgtgatagggagaaccgcacctctctggagctatgctggttccgtgaagggacaaccatgtacgccctctatatcaccgtccacggctacttcctcatcaccttcctctttggcatggtggtcctggccctggtggtctggaagatcttcaccctgtcccgtgctacagcggtcaaggagcgggggaagaaccggaagaaggtgctcaccctgctgggcctctcgagcctggtgggtgtgacatgggggttggccatcttcaccccgttgggcctctccaccgtctacatctttgcacttttcaactccttgcaaggtgtcttcatctgctgctggttcaccatcctttacctcccaagtcagagcaccacagtctcctcctctactgcaagattggaccaggcccactccgcatctcaagaatag

SEQ ID NO: 111 - protein, 274 aa, Homo sapiens [sequence omitted]

SEQ ID NO: 112 - DNA, 612 bp, Homo sapiens
  CDS (1)...(612)
atggggcaaatgaaacatgtctttgaggtcactttggcattaaagagacaccagactggagccaggtggcggcccctcccacagcgggagagccagggattgatgggtggaaatgggagaggcaccttcacagacagaaaagctcagccaggggacttcctgggtttgctggccagaggtaccactcccagtcccaccacagctgccccctcctccagatgctggttccgtgaagggacaaccatgtacgccctctatatcaccgtccacggctacttcctcatcaccttcctctttggcatggtggtcctggccctggtggtctggaagatcttcaccctgtcccgtgctacagcggtcaaggagcgggggaagaaccggaagaaggtgctcaccctgctgggcctctcgagcctggtgggtgtgacatgggggttggccatcttcaccccgttgggcctctccaccgtctacatctttgcacttttcaactccttgcaaggtgtcttcatctgctgctggttcaccatcctttacctcccaagtcagagcaccacagtctcctcctctactgcaagattggaccaggcccactccgcatctcaagaatag

SEQ ID NO: 113 - protein, 203 aa, Homo sapiens
MGQMKHVFEVTLALKRHQTGARWRPLPQRESQGLMGGNGRGTFTDRKAQPGDFLGLLARGTTPSPTTAAPSSRCWFREGTTMYALYITVHGYFLITFLFGMVVLALVVWKIFTLSRATAVKERGKNRKKVLTLLGLSSLVGVTWGLAIFTPLGLSTVYIFALFNSLQGVFICCWFTILYLPSQSTTVSSSTARLDQAHSASQE

SEQ ID NO: 114 - DNA, 4036 bp, Homo sapiens
ggccagagggccagacagccacagagctcctggcgtgggcaaggctggccaaggatggcgacgcccaggggcctgggggccctgctcctgctcctcctgctcccgacctcaggtcaggaaaagcccaccgaagggccaagaaacacctgcctggggagcaacaacatgtacgacatcttcaacttgaatgacaaggctttgtgcttcaccaagtgcaggcagtcgggcagcgactcctgcaatgtggaaaacttgcagagatactggctaaactacgaggcccatctgatgaaggaaggtttgacgcagaaggtgaacacgcctttcctgaaggctttggtccagaacctcagcaccaacactgcagaagacttctatttctctctggagccctctcaggttccgaggcaggtgatgaaggacgaggacaagccccctgacagagtgcgacttcccaagagcctttttcgatccctgccaggcaacaggtctgtggtccgcttggccgtcaccattctggacattggtccagggactctcttcacacatgtgtataccaggtatgtgcacccagaggtgtgcatccactcctgtgcagacgtgtgtacccctgagggctagtgtgctccccccaccagcctcctttctaccgaatgcacactcacgctaagaccctcaggggcacgctatcctccccgctgacttccatttcttggctgatcttggccccatgccccctctagttaagagggcagaggagctctggaggccagcaatggagagctgtcaggtgcacagctttgcagccagttgacctggcccagcccaagcaggagaccactgggagcagcagggaggaggctgcctgtgactccttggctccctggtcccctggtctcgaactctgccctccaagcaaaggccatgggttcctggaggctcctaggaaccccagcgttggtgggttgggatggccccttctgcagcctggcctccccgatctcccctttcacagggcccccggctcggcctgggagatggcagcggcgtgttgaacaatcgcctggtgggtttgagtgtgggacaaatgcatgtcaccaagctggctgagcctctggagatcgtcttctctcaccagcgaccgccccctgtgagtcccctgctcaggcctggcagccactgcagggcagacagaacatgaccctcacctgtgtattctgggatgtgactaaagggaccactggagactggtcttctgagggctgctccacggaggtcagacctgaggggaccgtgtgctgctgtgaccacctgacctttttcgccctgctcctgagacccaccttggaccagtccacggtgcatatcctcacacgcatctcccaggcgggctgtggggtctccatgatcttcctggccttcaccattattctttatgcctttctgcattccaggtgtttttttcttctcttcccaaggctgcctaatctctagccagtgtctggcttttgactgataggtgtgttgctcagttactttgggcccgtgtacgtttgtgtgtcacctccatcccataattttaagtacatgcatgatatgcagcccatatgcatgaaccttaagtagctaattatcatacagggttatgtgaaagaaactttttctctctaatgtaaatgcccatctctgaagagctgccccttactggtttggtccggatcttgccggccacggggtcccttttttatgtcacttttgtcttgcctgctgaacctctgcttttcatctcacttcttgctcacccgtcccattcaccgtgcttctattctctgcttttacttattctgccctttatccaacttttaattccctttgctattctcctgcctcattttctggcctcattttccctattatcctgcctcacattgatcaagggatgaggctggcaggatccggaacccacagggccccgtgggccatgagaggctcctggacttgaacctcaggacactcccactctggctgccggcagggatggaagctggatgagcaggcaggagctggcagtgggggtggagagccataggctattggggtggacaggcttgggtgcctcatgggagctccccatgggagctgtggccccttggggcctcttatttctcaccccaggctttcccgggagaggttcaagtcagaagatgccccaaagatccacgtggccctgggtggcagcctgttcctcctgaatctggccttcttggtcaatgtggggagtggctcaaaggggtctgatgctgcctgctgggcccggggggctgtcttccactacttcctgctctgtgccttcacctggatgggccttgaagccttccacctctacctgctcgctgtcagggtcttcaacacctacttcgggcactacttcctgaagctgagcctggtgggctggggcctgcccgccctgatggtcatcggcactgggagtgccaacagctacggcctctacaccatccgtgatagggagaaccgcacctctctggagctgtggggactgcagcggactggcagtcacaagcccatctaattagcggtcagttactatccttcaggagggcatccacagagctgccaggtgtatgattttataggagaagcagaaatctaggtgtttataccaaagcttctgattttaaaggcggccactaattccgtttttttcwcaatgtaatatggggcaaatgaaacatgtctttgaggtcactttggcattaaagagacaccagactggagccaggtggcggcccctcccacagcgggagagccagggattgatgggtggaaatgggagaggcaccttcacagacagaaaagctcagccaggggacttcctgggtttgctggccagaggtaccactcccagtcccaccacagctgccccctcctccagatgctggttccgtgaagggacaaccatgtacgccctctatatcaccgtccacggctacttcctcatcaccttcctctttggcatggtggtcctggccctggtggtctggaagatcttcaccctgtcccgtgctacagcggtcaaggagcgggggaagaaccggaagaaggtgctcaccctgctgggcctctcgagcctggtgggtgtgacatgggggttggccatcttcaccccgttgggcctctccaccgtctacatctttgcacttttcaactccttgcaaggtgaggcccctgcaccagggaggtgatgggctgtgttgtctgtcccaggaggtattgggaggtggggaagagggtggtttgcaagacacaggactctgttcaggctagctgaagtcaaggatgttgatttcaaatactcagagcaaggatccagggcagcaaagtttggctgctgtattagtccgtttgtgttacttgcaagttgggtgtccatcgtccatctctggtccaatcagctgcgaccagaagggcagaatcatgtgatatgatgtccacatgacatggatgggatctccagggattcttcatctgctgctggttcaccatcctttacctcccaagtcagagcaccacagtctcctcctctactgcaagattggaccaggcccactccgcatctcaagaataggaaggcacggccctgcaatatggactcagctctggctctctgtgtgaccttgggcagctccgtgcctctctctgtactccctcagtttccttctctgtacaatgtggctggggagggagaggatgggaccaggttggaccacgtggcatcagaggtcccatccagatccaactataggtccaagagtccacgtaagcaggtttgcaaggctctaaagttcctatagtcctgagaccccctgccagcaaagagtgacagtcacctccatgccctgccctcattgcaaagccctcactcaccttctggtctcagcaagggaggagagtctgttgctggcatagccctggaaggagcccccagcctctccccttctccttcttgtcactggcc

SEQ ID NO: 115 - DNA, 942 bp, Homo sapiens
  CDS (1)...(942)
atgaattgggtaaatgacagcatcatacaggagtttattctgctgggtttctcagatcgaccttggctggagtttccactccttgtggtcttcttgatttcttacactgtgaccatctttggcaatctgaccattattctagtgtcacgcctggacaccaaacttcatacccccatgtatttttttcttaccaatctatcactcctggatctttgttacaccacatgtacagtcccacaaatgctagtaaatttatgcagcatcaggaaagtaatcagttatcgtggctgtgtagcccagcttttcatatttctggccttgggggctactgaatatcttctcctggccgtcatgtcctttgataggtttgtagctatttgtcggcctctccattactcagttatcatgcaccagagactctgcctccagttggcagccgcatcctgggttactggttttagtaactcagtgtggttgtctaccctgactctccagctgccactctgtgacccctatgtgatagatcactttctctgtgaagtccctgcactgctcaagttatcttgtgttgagacaacagcaaatgaggctgaactattccttgtcagtgagctcttccatctaatacccctgacactcatccttatatcatatgcttttattgtccgagcagtattgaggatacagtctgctgaaggtcgacaaaaagcatttgggacatgtggttcccatctaattgtggtgtctcttttttatagtacagccgtctctgtgtacctgcaaccaccttcgcccagctccaaggaccaaggaaagatggtttctctcttctatggaatcattgcacccatgctgaatccccttatatatacacttaggaacaaggaggtaaaggaaggctttaaaaggttggttgcaagagtcttcttaatcaagaaataa

SEQ ID NO: 116 - protein, 313 aa, Homo sapiens
MNWVNDSIIQEFILLGFSDRPWLEFPLLVVFLISYTVTIFGNLTIILVSRLDTKLHTPMYFFLTNLSLLDLCYTTCTVPQMLVNLCSIRKVISYRGCVAQLFIFLALGATEYLLLAVMSFDRFVAICRPLHYSVIMHQRLCLQLAAASWVTGFSNSVWLSTLTLQLPLCDPYVIDHFLCEVPALLKLSCVETTANEAELFLVSELFHLIPLTLILISYAFIVRAVLRIQSAEGRQKAFGTCGSHLIVVSLFYSTAVSVYLQPPSPSSKDQGKMVSLFYGIIAPMLNPLIYTLRNKEVKEGFKRLVARVFLIKK

SEQ ID NO: 117 - DNA, 1488 bp, Homo sapiens
  misc_feature (1)...(1488): n = A,T,C or G
agaaaatactttggnaattatgagcattttcaanctgtatatttttcatgtaataaaancaagcaatatcaatttctgtaaatatcttcaaaacaggtagtaaaatgactataagtaactgaaatagttaacaaatatgtgttaattgacttcctgaatttttctgtttcaggaaaccaagagttgaaacattaatcatgaattgggtaaatgacagcatcatacaggagtttattctgctgggtttctcagatcgaccttggctggagtttccactccttgtggtcttcttgatttcttacactgtgaccatctttggcaatctgaccattattctagtgtcacgcctggacaccaaacttcatacccccatgtatttttttcttaccaatctatcactcctggatctttgttacaccacatgtacagtcccacaaatgctagtaaatttatgcagcatcaggaaagtaatcagttatcgtggctgtgtagcccagcttttcatatttctggccttgggggctactgaatatcttctcctggccgtcatgtcctttgataggtttgtagctatttgtcggcctctccattactcagttatcatgcaccagagactctgcctccagttggcagccgcatcctgggttactggttttagtaactcagtgtggttgtctaccctgactctccagctgccactctgtgacccctatgtgatagatcactttctctgtgaagtccctgcactgctcaagttatcttgtgttgagacaacagcaaatgaggctgaactattccttgtcagtgagctcttccatctaatacccctgacactcatccttatatcatatgcttttattgtccgagcagtattgaggatacagtctgctgaaggtcgacaaaaagcatttgggacatgtggttcccatctaattgtggtgtctcttttttatagtacagccgtctctgtgtacctgcaaccaccttcgcccagctccaaggaccaaggaaagatggtttctctcttctatggaatcattgcacccatgctgaatccccttatatatacacttaggaacaaggaggtaaaggaaggctttaaaaggttggttgcaagagtcttcttaatcaagaaataagaaatatgcaaatgataagctttgctaaagacaaaatgtttacttagcttactaacttctctgtaagttgccctatttttgttgttactgtagagaacaatgtaaactccctcaaataaaatttccttgatgaagagctatatttacttctgttgccttaatgttttcattgaacaagcccccagaattgaccttccaattcaccaaaaattgtaatcacaacatcttcaaggtttgtcaaacatcccatcaatgcttgtacaattcaatgtaaattagatccgtagaaaagccagaagttctttctccaatatcacacacacacacacacacacacacacacacacac

SEQ ID NO: 118 - DNA, 3648 bp, Homo sapiens
  CDS (1)...(3648)
atgggagccatggcttaccccttactcctctgcctcctgcttgctcagctgggattgggagctgttggcgccagccgcgacccccaaggacggccggattcccctcgagagaggaccccgaaggggaagccgcacgcccagcagccgggtcgagcctctgcctcggactcctcggctccctggagccgctccaccgatggcaccatcttggcgcagaaactcgccgaggaggtgcccatggacgtggcctcttacctctacaccggggactcccaccagctgaagcgagccaactgctccggccgctacgagttggcgggcctgccggggaagtggccagccctggccagcgcgcacccctccttgcaccgggcgctggacacactgacacacgccaccaacttcctcaacgtgatgctgcagagcaataagtcgcgggagcagaacttgcaggacgacctggattggtaccaggcgctggtgtggagccttctggagggcgagcccagcatctcccgggcggccatcaccttcagcaccgattcgctgtccgcaccggccccacaggtcttcctccaggccacgcgcgaggagagccgcatcctgctccaagacctgtcctcctccgcaccccacctggccaacgccactctggagaccgagtggttccacggcctccggcgcaagtggaggccccacttacaccgccgcggccccaatcaggggccccggggcctgggccacagctggcggcgcaaggacgggctcggcggggacaagagccacttcaagtggtctccgccttatctggagtgcgagaacgggagttacaagcccgggtggctggttactctttcctctgccatctacgggttgcagcctaacctggtcccggaattcaggggtgtcatgaaagttgacataaatcttcagaaagtggacattgaccaatgctcaagtgatggctggttttcaggaactcataaatgccacctcaacaattcagagtgtatgccaattaaaggcctaggattcgttcttggagcctatgagtgcatttgcaaagcaggattctatcatcctggagtcttaccagtgaacaactttcggagaaggggtccggatcagcatatttcaggaagtacaaaagatgtgtcagaagaagcctatgtctgcctaccttgcagggagggctgccccttctgtgctgatgacagcccatgcttcgtccaggaagataagtatttacgacttgccatcatctccttccaaggcctgtgtatgctgctcgacttcgttagcatgctggtggtctaccactttcgcaaagcaaagagcatccgggcatcgggccttatcctgttggaaacgatcctttttggatctctgctcctatactttccagttgttattttgtactttgagccaagcacatttcgctgtattctcctaagatgggctcgtcttctcggttttgctactgtttacggaactgtcactctcaaacttcacagggttttgaaggtgtttctttcacgaacggctcaacgaattccatatatgactggcggacgggtcatgaggatgctggcagtaatactcttggtagtgttttggtttctcattggctggacttcatctgtgtgccagaatttggagaaacagatttcacttattggccaggggaaaacatccgatcacctcatcttcaatatgtgcctcattgaccgctgggactacatgacagcagttgctgaatttttattcctcttgtggggtgtttatctctgctatgcagtgcggacagtcccatcggcattccatgagccccgctatatggctgttgcagttcacaatgagctcatcatctctgctatattccatacaattagatttgttcttgcctcaagacttcagtctgattggatgttgatgctgtattttgcacatactcatttgactgtgacagtcaccattgggttgcttttgattccaaagttttcacattcaagcaataacccacgagatgatattgctacagaagcatatgaggatgagctagacatgggccgatctggatcctacctgaacagcagtatcaattcagcctggagtgagcacagcttggatccagaggacattcgggacgagctgaaaaaactctatgcccaactggaaatatataaaagaaagaagatgatcacaaacaacccccacctccagaaaaagcggtgctcgaagaagggcctaggtcgttccatcatgagacgcattacggagatcccagagacagtcagccggcagtgctctaaagaggacaaggagggcgccgaccatggcacagccaaaggcactgccctcatcaggaagaaccccccagagtcttcagggaacacagggaaatccaaggaggagaccctgaaaaaccgagtcttctcactcaagaaatcccacagcacttatgaccacgtgagagaccaaacggaagagtccagtagcctacccacagaaagccaagaggaggagacaacagaaaattccacactggaatccctgtcgggtaaaaaactaacacaaaaactaaaagaagacagcgaggctgagtccacggagtcggtgccgttggtgtgcaagtcagcaagcgctcacaacctcagctcagagaagaaaactgggcacccacgaacatcgatgttacagaagtctctcagtgtcatagcaagcgccaaggagaagactcttggattagctgggaaaacccaaacagcaggtgtggaagaacgcactaaatcccagaaacctttgccaaaagataaagagacaaacagaaatcactcaaattctgataacacagagactaaagatcctgccccccaaaactcaaatcctgcggaggagccaagaaagcctcagaaatctgggattatgaaacaacaaagggtcaaccccaccactgccaattctgacctgaacccaggcaccacccagatgaaggacaactttgacattggggaggtgtgtccttgggaggtttatgacctgacccctggtcctgtgccttcagaatcaaaagttcaaaagcacgtatctattgtggcttctgaaatggagaaaaaccccactttttccttaaaggagaaatctcaccacaagcctaaggcagctgaggtttgtcagcaatccaatcagaagcgcatagataaggctgaagtatgcctttgggagagccaaggccagtccattttggaagatgagaagcttttgatttccaagactccagttctcccagagagggcaaaagaggagaacggaggtcagcctcgtgcagccaatgtgtgtgctgggcagagcgaagaactgccccccaaagctgtagcatcaaaaacagagaatgaaaatctcaaccaaataggacaccaggaaaaaaagacatcttcttctgaggagaatgtgcgtggctcctataactcaagtaataacttccagcaacctttaacatcacgagcagaggtttgtccttgggagtttgagaccccagctcaaccaaatgctggaagaagtgtagctttacctgcctcttctgctctaagtgcaaataagatagcagggcctaggaaagaagagatctgggatagttttaaagtgtag

SEQ ID NO: 119 - protein, 1215 aa, Homo sapiens
MGAMAYPLLLCLLLAQLGLGAVGASRDPQGRPDSPRERTPKGKPHAQQPGRASASDSSAPWSRSTDGTILAQKLAEEVPMDVASYLYTGDSHQLKRANCSGRYELAGLPGKWPALASAHPSLHRALDTLTHATNFLNVMLQSNKSREQNLQDDLDWYQALVWSLLEGEPSISRAAITFSTDSLSAPAPQVFLQATREESRILLQDLSSSAPHLANATLETEWFHGLRRKWRPHLHRRGPNQGPRGLGHSWRRKDGLGGDKSHFKWSPPYLECENGSYKPGWLVTLSSAIYGLQPNLVPEFRGVMKVDINLQKVDIDQCSSDGWFSGTHKCHLNNSECMPIKGLGFVLGAYECICKAGFYHPGVLPVNNFRRRGPDQHISGSTKDVSEEAYVCLPCREGCPFCADDSPCFVQEDKYLRLAIISFQGLCMLLDFVSMLVVYHFRKAKSIRASGLILLETILFGSLLLYFPVVILYFEPSTFRCILLRWARLLGFATVYGTVTLKLHRVLKVFLSRTAQRIPYMTGGRVMRMLAVILLVVFWFLIGWTSSVCQNLEKQISLIGQGKTSDHLIFNMCLIDRWDYMTAVAEFLFLLWGVYLCYAVRTVPSAFHEPRYMAVAVHNELIISAIFHTIRFVLASRLQSDWMLMLYFAHTHLTVTVTIGLLLIPKFSHSSNNPRDDIATEAYEDELDMGRSGSYLNSSINSAWSEHSLDPEDIRDELKKLYAQLEIYKRKKMITNNPHLQKKRCSKKGLGRSIMRRITEIPETVSRQCSKEDKEGADHGTAKGTALIRKNPPESSGNTGKSKEETLKNRVFSLKKSHSTYDHVRDQTEESSSLPTESQEEETTENSTLESLSGKKLTQKLKEDSEAESTESVPLVCKSASAHNLSSEKKTGHPRTSMLQKSLSVIASAKEKTLGLAGKTQTAGVEERTKSQKPLPKDKETNRNHSNSDNTETKDPAPQNSNPAEEPRKPQKSGIMKQQRVNPTTANSDLNPGTTQMKDNFDIGEVCPWEVYDLTPGPVPSESKVQKHVSIVASEMEKNPTFSLKEKSHHKPKAAEVCQQSNQKRIDKAEVCLWESQGQSILEDEKLLISKTPVLPERAKEENGGQPRAANVCAGQSEELPPKAVASKTENENLNQIGHQEKKTSSSEENVRGSYNSSNNFQQPLTSRAEVCPWEFETPAQPNAGRSVALPASSALSANKIAGPRKEEIWDSFKV

SEQ ID NO: 120 - DNA, 1800 bp, Homo sapiens
  CDS (1)...(1800)
atgggagccatggcttaccccttactcctctgcctcctgcttgctcagctgggattgggagctgttggcgccagccgcgacccccaaggacggccggattcccctcgagagaggaccccgaaggggaagccgcacgcccagcagccgggtcgagcctctgcctcggactcctcggctccctggagccgctccaccgatggcaccatcttggcgcagaaactcgccgaggaggtgcccatggacgtggcctcttacctctacaccggggactcccaccagctgaagcgagccaactgctccggccgctacgagttggcgggcctgccggggaagtggccagccctggccagcgcgcacccctccttgcaccgggcgctggacacactgacacacgccaccaacttcctcaacgtgatgctgcagagcaataagtcgcgggagcagaacttgcaggacgacctggattggtaccaggcgctggtgtggagccttctggagggcgagcccagcatctcccgggcggccatcaccttcagcaccgattcgctgtccgcaccggccccacaggtcttcctccaggccacgcgcgaggagagccgcatcctgctccaagacctgtcctcctccgcaccccacctggccaacgccactctggagaccgagtggttccacggcctccggcgcaagtggaggccccacttacaccgccgcggccccaatcaggggccccggggcctgggccacagctggcggcgcaaggacgggctcggcggggacaagagccacttcaagtggtctccgccttatctggagtgcgagaacgggagttacaagcccgggtggctggttactctttcctctgccatctacgggttgcagcctaacctggtcccggaattcaggggtgtcatgaaagttgacataaatcttcagaaagtggacattgaccaatgctcaagtgatggctggttttcaggaactcataaatgccacctcaacaattcagagtgtatgccaattaaaggcctaggattcgttcttggagcctatgagtgcatttgcaaagcaggattctatcatcctggagtcttaccagtgaacaactttcggagaaggggtccggatcagcatatttcaggaagtacaaaagatgtgtcagaagaagcctatgtctgcctaccttgcagggagggctgccccttctgtgctgatgacagcccatgcttcgtccaggaagataagtatttacgacttgccatcatctccttccaaggcctgtgtatgctgctcgacttcgttagcatgctggtggtctaccactttcgcaaagcaaagagcatccgggcatcgggccttatcctgttggaaacgatcctttttggatctctgctcctatactttccagttgttattttgtactttgagccaagcacatttcgctgtattctcctaagatgggctcgtcttctcggttttgctactgtttacggaactgtcactctcaaacttcacagggttttgaaggtgtttctttcacgaacggctcaacgaattccatatatgactggcggacgggtcatgaggatgctggcagtaatactcttggtagtgttttggtttctcattggctggacttcatctgtgtgccagaatttggagaaacagatttcacttattggccaggggaaaacatccgatcacctcatcttcaatatgtgcctcattgaccgctgggactacatgacagcagttggtatgtggtcacttgtttcgtatgatggtcttaccatttttcagtag

SEQ ID NO: 121 - protein, 599 aa, Homo sapiens
MGAMAYPLLLCLLLAQLGLGAVGASRDPQGRPDSPRERTPKGKPHAQQPGRASASDSSAPWSRSTDGTILAQKLAEEVPMDVASYLYTGDSHQLKRANCSGRYELAGLPGKWPALASAHPSLHRALDTLTHATNFLNVMLQSNKSREQNLQDDLDWYQALVWSLLEGEPSISRAAITFSTDSLSAPAPQVFLQATREESRILLQDLSSSAPHLANATLETEWFHGLRRKWRPHLHRRGPNQGPRGLGHSWRRKDGLGGDKSHFKWSPPYLECENGSYKPGWLVTLSSAIYGLQPNLVPEFRGVMKVDINLQKVDIDQCSSDGWFSGTHKCHLNNSECMPIKGLGFVLGAYECICKAGFYHPGVLPVNNFRRRGPDQHISGSTKDVSEEAYVCLPCREGCPFCADDSPCFVQEDKYLRLAIISFQGLCMLLDFVSMLVVYHFRKAKSIRASGLILLETILFGSLLLYFPVVILYFEPSTFRCILLRWARLLGFATVYGTVTLKLHRVLKVFLSRTAQRIPYMTGGRVMRMLAVILLVVFWFLIGWTSSVCQNLEKQISLIGQGKTSDHLIFNMCLIDRWDYMTAVGMWSLVSYDGLTIFQ

SEQ ID NO: 122 - DNA, 7148 bp, Homo sapiens
ggtgagactatgragcagcgtcttcggcggccgcggcggcagcagcagcagcagcttctgaacgcgcctcaatgagagcggcggtggcggcagccgggccgagagacggactcgggctgactccagccgctgggagcgcgaggccatgtaacccgctcggctccaggctgcgaggtgcgtaatccccagccggcccctcgcgcagcgggcacggccagcgctgccacaggtgacttgatttctgcgacggtagcttagccacccggggccaatctcgaaacattcttattttcaagtcctttggactgggtgccatctggagaagggggaagactcctcgaaaaagtctgactgttgagaaactgacgatccaaatttaaaaagtgattccccccctcccgttccctcctcttctctctgggaggcagatgggagccatggcttaccccttactcctctgcctcctgcttgctcagctgggattgggagctgttggcgccagccgcgacccccaaggacggccggattcccctcgagagaggaccccgaaggggaagccgcacgcccagcagccgggtcgagcctctgcctcggactcctcggctccctggagccgctccaccgatggcaccatcttggcgcagaaactcgccgaggaggtgcccatggacgtggcctcttacctctacaccggggactcccaccagctgaagcgagccaactgctccggccgctacgagttggcgggcctgccggggaagtggccagccctggccagcgcgcacccctccttgcaccgggcgctggacacactgacacacgccaccaacttcctcaacgtgatgctgcagagcaataagtcgcgggagcagaacttgcaggacgacctggattggtaccaggcgctggtgtggagccttctggagggcgagcccagcatctcccgggcggccatcaccttcagcaccgattcgctgtccgcaccggccccacaggtcttcctccaggccacgcgcgaggagagccgcatcctgctccaagacctgtcctcctccgcaccccacctggccaacgccactctggagaccgagtggttccacggcctccggcgcaagtggaggccccacttacaccgccgcggccccaatcaggggccccggggcctgggccacagctggcggcgcaaggacgggctcggcggggacaagagccacttcaagtggtctccgccttatctggagtgcgagaacgggagttacaagcccgggtggctggttactctttcctctgccatctacgggttgcagcctaacctggtcccggaattcaggggtgtcatgaaagttgacataaatcttcagaaagtggacattgaccaatgctcaagtgatggctggttttcaggaactcataaatgccacctcaacaattcagagtgtatgccaattaaaggcctaggattcgttcttggagcctatgagtgcatttgcaaagcaggattctatcatcctggagtcttaccagtgaacaactttcggagaaggggtccggatcagcatatttcaggaagtacaaaagatgtgtcagaagaagcctatgtctgcctaccttgcagggagggctgccccttctgtgctgatgacagcccatgcttcgtccaggaagataagtatttacgacttgccatcatctccttccaaggcctgtgtatgctgctcgacttcgttagcatgctggtggtctaccactttcgcaaagcaaagagcatccgggcatcgggccttatcctgttggaaacgatcctttttggatctctgctcctatactttccagttgttattttgtactttgagccaagcacatttcgctgtattctcctaagatgggctcgtcttctcggttttgctactgtttacggaactgtcactctcaaacttcacagggttttgaaggtgtttctttcacgaacggctcaacgaattccatatatgactggcggacgggtcatgaggatgctggcagtaatactcttggtagtgttttggtttctcattggctggacttcatctgtgtgccagaatttggagaaacagatttcacttattggccaggggaaaacatccgatcacctcatcttcaatatgtgcctcattgaccgctgggactacatgacagcagttggtatgtggtcacttgtttcgtatgatggtcttaccatttttcagtagcattacaactgacttctttaaaagtcttgccagactctttagtaaagcctaaactaatctcacctactgaatttttattcctcttgtggggtgtttatctctgctatgcagtgcggacagtcccatcggcattccatgagccccgctatatggctgttgcagttcacaatgagctcatcatctctgctatattccatacaattagatttgttcttgcctcaagacttcagtctgattggatgttgatgctgtattttgcacatactcatttgactgtgacagtcaccattgggttgcttttgattccaaagttttcacattcaagcaataacccacgagatgatattgctacagaagcatatgaggatgagctagacatgggccgatctggatcctacctgaacagcagtatcaattcagcctggagtgagcacagcttggatccagaggacattcgggacgagctgaaaaaactctatgcccaactggaaatatataaaagaaagaagatgatcacaaacaacccccacctccagaaaaagcggtgctcgaagaagggcctaggtcgttccatcatgagacgcattacggagatcccagagacagtcagccggcagtgctctaaagaggacaaggagggcgccgaccatggcacagccaaaggcactgccctcatcaggaagaaccccccagagtcttcagggaacacagggaaatccaaggaggagaccctgaaaaaccgagtcttctcactcaagaaatcccacagcacttatgaccacgtgagagaccaaacggaagagtccagtagcctacccacagaaagccaagaggaggagacaacagaaaattccacactggaatccctgtcgggtaaaaaactaacacaaaaactaaaagaagacagcgaggctgagtccacggagtcggtgccgttggtgtgcaagtcagcaagcgctcacaacctcagctcagagaagaaaactgggcacccacgaacatcgatgttacagaagtctctcagtgtcatagcaagcgccaaggagaagactcttggattagctgggaaaacccaaacagcaggtgtggaagaacgcactaaatcccagaaacctttgccaaaagataaagagacaaacagaaatcactcaaattctgataacacagagactaaagatcctgccccccaaaactcaaatcctgcggaggagccaagaaagcctcagaaatctgggattatgaaacaacaaagggtcaaccccaccactgccaattctgacctgaacccaggcaccacccagatgaaggacaactttgacattggggaggtgtgtccttgggaggtttatgacctgacccctggtcctgtgccttcagaatcaaaagttcaaaagcacgtatctattgtggcttctgaaatggagaaaaaccccactttttccttaaaggagaaatctcaccacaagcctaaggcagctgaggtttgtcagcaatccaatcagaagcgcatagataaggctgaagtatgcctttgggagagccaaggccagtccattttggaagatgagaagcttttgatttccaagactccagttctcccagagagggcaaaagaggagaacggaggtcagcctcgtgcagccaatgtgtgtgctgggcagagcgaagaactgccccccaaagctgtagcatcaaaaacagagaatgaaaatctcaaccaaataggacaccaggaaaaaaagacatcttcttctgaggagaatgtgcgtggctcctataactcaagtaataacttccagcaacctttaacatcacgagcagaggtttgtccttgggagtttgagaccccagctcaaccaaatgctggaagaagtgtagctttacctgcctcttctgctctaagtgcaaataagatagcagggcctaggaaagaagagatctgggatagttttaaagtgtagcatctccaggaagaagaggaaaaggagggaaccccggattggatatgagacagaagatataagaatcaaatattcccaaggaggatttgtcaatcaaggaaaacatgacagatggtgaggtaaagtcaaaggcatgggtagaagaggaccaggggggcaagagcaacaacgtcataatggagaagtcagactttggtcaagaaagtccttcccttggtaacactaggaaaatctttccatttcagcatgtttaaggaaaatagcccacaatgtctgccctgatcaatatgtatccatgggactttgaagatcctaagccaggtaaaccaggagacacagaagacgtaccagatttgcaaagaaagaaaaggtataagacatatataactgaaattctaagtagctgaccgagaagaacttactttacctatttaaccttgatagcactgctaacttaatgcatcccaaaaatatcttttatattaatgattgctctcattttcttataaatgtatgtttcagtatatcgttgtgtctcatattcaagcattccagattgtataatttttgcaaataactttggtattatgtgacacaacacatttatgcaatctgcagctattcaattgttattgcaccttacagaatacctgctatctatcaactttagttgattcttgaagtacagtaagctttctctggcttgggaagccataactgttactataaaaacttttagttttggctgtggtttatatattgtgactttgaatttgactctattatttcacatcatggtttgttatactgtcttaatcagggttttttatacaagttgagttacttgttttgcacttcttgttaggactcagaagctttattaatattggagatcaagtggtcctacttagtcatatgtctcaataagttaaggacaacttatccgttgtttattcaaagtcagagatagataacgccttcattccaattaattgtcccttttaactctttcagtatttcctacttagcagcatttccaaaggaagaagctaagagtgagaaaaatataccgtgcattattattactattggaaagggaagactctagggatgacataagaattatagcagtactataaacccaggaagtttgcctttcaaaaaaaaaacacaggtagctcctgatagcactttcaagggattatttttttaaagagaaaaattatggtagcatcaagatcattgtatggatatatttttattatgtgtactgaaaatacagtattttaaaataccttaaagtatttattctcataaactcttattcattgcttcagctacaggtagaacttgctgggctcaaatcccaaagaggttttataaccttatttattcaaaacctataaggtggtatggaatcttcattctcccaagcactggaaaatgtctaagtcctgcaaattgccattgtgagccacttgctcgacatgtaacatgtaaggtccatttgcaaagcaaagcagcccccaaagcatattttataaagcttattgcattccacactgatctcttggcatgggaatcctaagctgccgactaagccctaccgacatgatcatgcagtgagattccaaagctcagtctcatttcatttaaagaagaatcactcagaaatagaaccgagacttccctttttctccctgtaaacacccaagtatcaactgcttatttggccaggacactcccagcacaaataactattttttatgtcacaagcggcaaggaggacatgctagggtgataaaagatggagaaacaggatcagagggtggatatagggctgttcttagagagtattttcagtggaaggtaaaaacagaattctccatattcatcatcaaatttttctcagtgatttttttattcaggagtaagcaagcacttcactgtttcacaaagctgtgcgcaaatcttcctcacccatttgctgactttatgcattactcaggttggtggggtcggtttgagaagatatagaaattctatttttgtgtctttacaccatttatttcttttatctcttccttttcaatgaaggcctatatgcttggtgacctcctttaaggaatctttgtgaattgggttggaagttcctagacccacatatttgtttcatttatgtctgaaatctgttagcacttgattcctttcttgagaattatgcagtcaagcatcagtgactttctattgcacttcaggattgatcctgctagagatgtgagttaaaaagacttgccaaattatatcttagcgacattctatagttcatagattattctccaccagcataaatcagtgagagtgcctagagtctttctgagagtttcattgccattatcaacaagagaagttgaaatttacaagtcaggaggttatttttccagattgataaccatagaaagtgaataaacacttttaaggtcgcaaacatttgctaggttgtccttctcaatgcatgtgcaggctgcatcctgtccttgtttttaagccagggtttataaataagtagatttataccaatcttaatagaattgtatattttatgcaagaattaaatgctttacaacatgaagtataactcaacccattgtaaactttggtggcaatatggatttgaaactcgacagttctcttgtatttgcttcctaggtttctgcatgcaagttatgacaggtaggactgaaaaaacactgccttttgacttctagcatttagcaaccgagagtcgtagagtcaataaagctgtaagtgtcttcacttaatctgtggttctcctaaaactattatctgaaacctacagcatcccaccatgaaatatttggtaaatttatgttgtgacgtgttgcagcatgtaaataattataacttctctgcaataaaacatatttatatgaaagtg

SEQ ID NO: 123 - DNA, 594 bp, Homo sapiens
  CDS (1)...(594)
atggatccaaccaccccggcctggggaacagaaagtacaacagtgaatggaaatgaccaagcccttcttctgctttgtggcaaggagaccctgatcccggtcttcctgatccttttcattgccctggtcgggctggtaggaaacgggtttgtgctctggctcctgggcttccgcatgcgcaggaacgccttctctgtctacgtcctcagcctggccggggccgacttcctcttcctctgcttccagattataaattgcctggtgtacctcagtaacttcttctgttccatctccatcaatttccctagcttcttcaccactgtgatgacctgtgcctaccttgcaggcctgagcatgctgagcaccgtcagcaccgagcgctgcctgtccgtcctgtggcccatctggtatcgctgccgccgccccagacacctgtcagcggtcgtgtgtgtcctgctctgggccctgtccctactgctgagcatcttggaaggaagcagtggcggctgcagcagaagttctgtggcttcttatttagtgatggtgactctggttggtgtcagacatttgatttcatcactgcagcgtggctga

SEQ ID NO: 124 - protein, 197 aa, Homo sapiens
MDPTTPAWGTESTTVNGNDQALLLLCGKETLIPVFLILFIALVGLVGNGFVLWLLGFRMRRNAFSVYVLSLAGADFLFLCFQIINCLVYLSNFFCSISINFPSFFTTVMTCAYLAGLSMLSTVSTERCLSVLWPIWYRCRRPRHLSAVVCVLLWALSLLLSILEGSSGGCSRSSVASYLVMVTLVGVRHLISSLQRG

SEQ ID NO: 125 - DNA, 813 bp, Homo sapiens
  CDS (1)...(813)
atggatccaaccaccccggcctggggaacagaaagtacaacagtgaatggaaatgaccaagcccttcttctgctttgtggcaaggagaccctgatcccggtcttcctgatccttttcattgccctggtcgggctggtaggaaacgggtttgtgctctggctcctgggcttccgcatgcgcaggaacgccttctctgtctacgtcctcagcctggccggggccgacttcctcttcctctgcttccagattataaattgcctggtgtacctcagtaacttcttctgttccatctccatcaatttccctagcttcttcaccactgtgatgacctgtgcctaccttgcaggcctgagcatgctgagcaccgtcagcaccgagcgctgcctgtccgtcctgtggcccatctggtatcgctgccgccgccccagacacctgtcagcggtcgtgtgtgtcctgctctgggccctgtccctactgctgagcatcttggaagggaagttctgtggcttcttatttagtgatggtgactctggttggtgtcagacatttgatttcatcactgcagcgtggctgatttttttattcatggttctctgtgggtccagtctggccctgctggtcaggatcctctgtggctccaggggtctgccactgaccaggctgtacctgaccatcctgctcacagtgctggtgttcctcctctgcggcctgccctttggcattcagtggttcctaatattatggatctggaaggattctgatgtcttattttggcatattcatccaagtttcagttgtcctgtcatctcttaa

SEQ ID NO: 126 - protein, 270 aa, Homo sapiens
MDPTTPAWGTESTTVNGNDQALLLLCGKETLIPVFLILFIALVGLVGNGFVLWLLGFRMRRNAFSVYVLSLAGADFLFLCFQIINCLVYLSNFFCSISINFPSFFTTVMTCAYLAGLSMLSTVSTERCLSVLWPIWYRCRRPRHLSAVVCVLLWALSLLLSILEGKFCGFLFSDGDSGWCQTFDFITAAWLIFLFMVLCGSSLALLVRILCGSRGLPLTRLYLTILLTVLVFLLCGLPFGIQWFLILWIWKDSDVLFWHIHPSFSCPVIS

SEQ ID NO: 127 - DNA, 762 bp, Homo sapiens
  CDS (1)...(762)
atggatccaaccaccccggcctggggaacagaaagtacaacagtgaatggaaatgaccaagcccttcttctgctttgtggcaaggagaccctgatcccggtcttcctgatccttttcattgccctggtcgggctggtaggaaacgggtttgtgctctggctcctgggcttccgcatgcgcaggaacgccttctctgtctacgtcctcagcctggccggggccgacttcctcttcctctgcttccagattataaattgcctggtgtacctcagtaacttcttctgttccatctccatcaatttccctagcttcttcaccactgtgatgacctgtgcctaccttgcaggcctgagcatgctgagcaccgtcagcaccgagcgctgcctgtccgtcctgtggcccatctggtatcgctgccgccgccccagacacctgtcagcggtcgtgtgtgtcctgctctgggccctgtccctactgctgagcatcttggaaggaagcagtggcggctgcagcagccgatcctcaagctggctctccagagggctctgcaggacattgctgaggtggatcacagtgaaggatgcttccgtcagggcaccccggagatgtcgagaagcagtctggtgtagagatggacagcctctacttccatcagatatatgtggctttgagaggcaactttgcccctgtctgtctgatttgctgaactttctcagtcctgattttaaaacagttaagagagtccttgtgaggattaagtga

SEQ ID NO: 128 - protein, 253 aa, Homo sapiens
MDPTTPAWGTESTTVNGNDQALLLLCGKETLIPVFLILFIALVGLVGNGFVLWLLGFRMRRNAFSVYVLSLAGADFLFLCFQIINCLVYLSNFFCSISINFPSFFTTVMTCAYLAGLSMLSTVSTERCLSVLWPIWYRCRRPRHLSAVVCVLLWALSLLLSILEGSSGGCSSRSSSWLSRGLCRTLLRWITVKDASVRAPRRCREAVWCRDGQPLLPSDICGFERQLCPCLSDLLNFLSPDFKTVKRVLVRIK

SEQ ID NO: 129 - DNA, 609 bp, Homo sapiens
  CDS (1)...(609)
atggatccaaccaccccggcctggggaacagaaagtacaacagtgaatggaaatgaccaagcccttcttctgctttgtggcaaggagaccctgatcccggtcttcctgatccttttcattgccctggtcgggctggtaggaaacgggtttgtgctctggctcctgggcttccgcatgcgcaggaacgccttctctgtctacgtcctcagcctggccggggccgacttcctcttcctctgcttccagattataaattgcctggtgtacctcagtaacttcttctgttccatctccatcaatttccctagcttcttcaccactgtgatgacctgtgcctaccttgcaggcctgagcatgctgagcaccgtcagcaccgagcgctgcctgtccgtcctgtggcccatctggtatcgctgccgccgccccagacacctgtcagcggtcgtgtgtgtcctgctctgggccctgtccctactgctgagcatcttggaagggccgatcctcaagctggctctccagagggctctgcaggacattgctgaggtggatcacagtgaaggatgcttccgtcagggcaccccggagatgtcgagaagcagtctggtgtag

SEQ ID NO: 130 - protein, 202 aa, Homo sapiens
MDPTTPAWGTESTTVNGNDQALLLLCGKETLIPVFLILFIALVGLVGNGFVLWLLGFRMRRNAFSVYVLSLAGADFLFLCFQIINCLVYLSNFFCSISINFPSFFTTVMTCAYLAGLSMLSTVSTERCLSVLWPIWYRCRRPRHLSAVVCVLLWALSLLLSILEGPILKLALQRALQDIAEVDHSEGCFRQGTPEMSRSSLV

SEQ ID NO: 131 - DNA, 1825 bp, Homo sapiens
tataggagaaacccagataagtgattggagtcagggcaaatgctgagaaacatctcatgtggtttcctgtgtcatactcttattttccagcaccctctgtacaggaaatcacagggatgttgagcatcttgataagcttcactcagtcatcaggtttcactccagatcctgcaggcatctccccatcctcagctgtttgccagtcccaggaaagcacttctcaactcaccaactccagtagaaagaagggtgttaaggggcaccagtggaggttttctgagcatggatccaaccaccccggcctggggaacagaaagtacaacagtgaatggaaatgaccaagcccttcttctgctttgtggcaaggagaccctgatcccggtcttcctgatccttttcattgccctggtcgggctggtaggaaacgggtttgtgctctggctcctgggcttccgcatgcgcaggaacgccttctctgtctacgtcctcagcctggccggggccgacttcctcttcctctgcttccagattataaattgcctggtgtacctcagtaacttcttctgttccatctccatcaatttccctagcttcttcaccactgtgatgacctgtgcctaccttgcaggcctgagcatgctgagcaccgtcagcaccgagcgctgcctgtccgtcctgtggcccatctggtatcgctgccgccgccccagacacctgtcagcggtcgtgtgtgtcctgctctgggccctgtccctactgctgagcatcttggaagggaagttctgtggcttcttatttagtgatggtgactctggttggtgtcagacatttgatttcatcactgcagcgtggctgatttttttattcatggttctctgtgggtccagtctggccctgctggtcaggatcctctgtggctccaggggtctgccactgaccaggctgtacctgaccatcctgctcacagtgctggtgttcctcctctgcggcctgccctttggcattcagtggttcctaatattatggatctggaaggattctgatgtcttattttggcatattcatccaagtttcagttgtcctgtcatctcttaacagcagtgccaaccccatcatttacttcttcgtgggctcttttaggaagcagtggcggctgcagcaacccgatcctcaagctggctctccagagggctctgcaggacattgctgaggtggatcacagtgaaggatgcttccgtcagggcaccccggagatgtcgagaagcagtctggtgtagagatggacagcctctacttccatcagatatatgtggctttgagaggcaactttgcccctgtctgtctgatttgctgaactttctcagtcctgattttaaaacagttaagagagtccttgtgaggattaagtgagacagtgcctatgaaacaaacactaagtgcagtgtctctggaactgccttactcacaggcttccaccacagccctatgagagctttgccaactctgcggtccatgactgttcccacttttaatgaatcctacctttcgcagaaggctgaaagcagggcagaaaagatctacatttctttggacactgcacttgatagggactcaaagaatgttatatttttaattaatttctttttctcttccgtacaatttctgtctcaacaaaattagaagaattaaatttaaaactagctccaaaagagcagtcgtctttcattttggcagaccttaagaatatccccctagcttaataaatcttttgttgaatggcttaatgaatgaataaactgggtaatggttaaagttaaaacctctg

SEQ ID NO: 132 - DNA, 2526 bp, Homo sapiens
  CDS (1)...(2526)
atgctgctctgcacggctcgcctggtcggcctgcagcttctcatttcctgctgctgggcctttgcctgccatagcacggagtcttctcctgacttcaccctccccggagattacctcctggcaggcctgttccctctccattctggctgtctgcaggtgaggcacagacccgaggtgaccctgtgtgacaggtcttgtagcttcaatgagcatggctaccacctcttccaggctatgcggcttggggttgaggagataaacaactccacggccctgctgcccaacatcaccctggggtaccagctgtatgatgtgtgttytgactctgccaatgtgtatgccacgctgagagtgctctccctgccagggcaacaccacatagagctccaaggagaccttctccactattcccctacggtgctggcagtgattgggcctgacagcaccaaccgtgctgccaccacagccgccctgctgagccctttcctggtgcccatgattagctatgcggccagcagcgagacgctcagcgtgaagcggcagtatccctctttcctgcgcaccatccccaatgacaagtaccaggtggagaccatggtgctgctgctgcagaagttcgggtggacctggatctctctggttggcagcagtgacgactatgggcagctaggggtgcaggcactggagaaccaggccactggtcaggggatctgcattgctttcaaggacatcatgcccttctctgcccaggtgggcgatgagaggatgcagtgcctcatgcgccacctggcccaggccggggccaccgtcgtggttgttttttccagccggcagttggccagggtgtttttcgagtccgtggtgctgaccaacctgactggcaaggtgtgggtcgcctcagaagcctgggccctctccaggcacatcactggggtgcccgggatccagcgcattgggatggtgctgggcgtggccatccagaagagggctgtccctggcctgaaggcgtttgaagaagcctatgcccgggcagacaaggaggcccctaggccttgccacaagggctcctggtgcagcagcaatcagctctgcagagaatgccaagctttcatgrcacacacgatgcccaagctcaaagccttctccatgagttctgcctacaacgcataccgggctgtgtatgcggtggcccatggcctccaccagctcctgggctgtgcctctggagcttgttccaggggccgagtctacccctggcagcttttggagcagatccacaaggtgcatttccttctacacaaggacactgtggcgtttaatgacaacagagatcccctcagtagctataacataattgcctgggactggaatggacccaagtggaccttcacggtcctcggttcctccacatggtctccagttcagctaaacataaatgagaccaaaatccagtggcacggaaaggacaaccaggtgcctaagtctgtgtgttccagcgactgtcttgaagggcaccagcgagtggttacgggtttccatcactgctgctttgagtgtgtgccctgtggggctgggaccttcctcaacaagagtgacctctacagatgccagccttgtgggaaagaagagtgggcacctgagggaagccagacctgcttcccgcgcactgtggtgtttttggctttgcgtgagcacacctcttgggtgctgctggcagctaacacgctgctgctgctgctgctgcttgggactgctggcctgtttgcctggcacctagacacccctgtggtgaggtcagcagggggccgcctgtgctttcttatgctgggctccctggcagcaggtagtggcagcctctatggcttctttggggaacccacaaggcctgcgtgcttgctacgccaggccctctttgcccttggtttcaccatcttcctgtcctgcctgacagttcgctcattccaactaatcatcatcttcaagttttccaccaaggtacctacattctaccacgcctgggtccaaaaccacggtgctggcctgtttgtgatgatcagctcagcggcccagctgcttatctgtctaacttggctggtggtgtggaccccactgcctgctagggaataccagcgcttcccccatctggtgatgcttgagtgcacagagaccaactccctgggcttcatactggccttcctctacaatggcctcctctccatcagtgcctttgcctgcagctacctgggtaaggacttgccagagaactacaacgaggccaaatgygtcaccttcagcctgctcttcaacttcgtgtcctggatcgccttcttcaccacggccagcgtctacgacggcaagtacctgcctgcggccaacatgatggctgggctgagcagcctgagcagcggcttcggtgggtattttctgcctaagtgctacgtgatcctctgccgcccagacctcaacagcacagagcacttccaggcctccattcaggactacacgaggcgctgcggctccacctga

SEQ ID NO: 133 - protein, 841 aa, Homo sapiens
  VARIANT (1)...(841): Xaa = Any Amino Acid
MLLCTARLVGLQLLISCCWAFACHSTESSPDFTLPGDYLLAGLFPLHSGCLQVRHRPEVTLCDRSCSFNEHGYHLFQAMRLGVEEINNSTALLPNITLGYQLYDVCXDSANVYATLRVLSLPGQHHIELQGDLLHYSPTVLAVIGPDSTNRAATTAALLSPFLVPMISYAASSETLSVKRQYPSFLRTIPNDKYQVETMVLLLQKFGWTWISLVGSSDDYGQLGVQALENQATGQGICIAFKDIMPFSAQVGDERMQCLMRHLAQAGATVVVVFSSRQLARVFFESVVLTNLTGKVWVASEAWALSRHITGVPGIQRIGMVLGVAIQKRAVPGLKAFEEAYARADKEAPRPCHKGSWCSSNQLCRECQAFMXHTMPKLKAFSMSSAYNAYRAVYAVAHGLHQLLGCASGACSRGRVYPWQLLEQIHKVHFLLHKDTVAFNDNRDPLSSYNIIAWDWNGPKWTFTVLGSSTWSPVQLNINETKIQWHGKDNQVPKSVCSSDCLEGHQRVVTGFHHCCFECVPCGAGTFLNKSDLYRCQPCGKEEWAPEGSQTCFPRTVVFLALREHTSWVLLAANTLLLLLLLGTAGLFAWHLDTPVVRSAGGRLCFLMLGSLAAGSGSLYGFFGEPTRPACLLRQALFALGFTIFLSCLTVRSFQLIIIFKFSTKVPTFYHAWVQNHGAGLFVMISSAAQLLICLTWLVVWTPLPAREYQRFPHLVMLECTETNSLGFILAFLYNGLLSISAFACSYLGKDLPENYNEAKCVTFSLLFNFVSWIAFFTTASVYDGKYLPAANMMAGLSSLSSGFGGYFLPKCYVILCRPDLNSTEHFQASIQDYTRRCGST

SEQ ID NO: 134 - DNA, 2292 bp, Homo sapiens
  CDS (1)...(2292)
atgcggcttggggttgaggagataaacaactccacggccctgctgcccaacatcaccctggggtaccagctgtatgatgtgtgttytgactctgccaatgtgtatgccacgctgagagtgctctccctgccagggcaacaccacatagagctccaaggagaccttctccactattcccctacggtgctggcagtgattgggcctgacagcaccaaccgtgctgccaccacagccgccctgctgagccctttcctggtgcccatgattagctatgcggccagcagcgagacgctcagcgtgaagcggcagtatccctctttcctgcgcaccatccccaatgacaagtaccaggtggagaccatggtgctgctgctgcagaagttcgggtggacctggatctctctggttggcagcagtgacgactatgggcagctaggggtgcaggcactggagaaccaggccactggtcaggggatctgcattgctttcaaggacatcatgcccttctctgcccaggtgggcgatgagaggatgcagtgcctcatgcgccacctggcccaggccggggccaccgtcgtggttgttttttccagccggcagttggccagggtgtttttcgagtccgtggtgctgaccaacctgactggcaaggtgtgggtcgcctcagaagcctgggccctctccaggcacatcactggggtgcccgggatccagcgcattgggatggtgctgggcgtggccatccagaagagggctgtccctggcctgaaggcgtttgaagaagcctatgcccgggcagacaaggaggcccctaggccttgccacaagggctcctggtgcagcagcaatcagctctgcagagaatgccaagctttcatgrcacacacgatgcccaagctcaaagccttctccatgagttctgcctacaacgcataccgggctgtgtatgcggtggcccatggcctccaccagctcctgggctgtgcctctggagcttgttccaggggccgagtctacccctggcagcttttggagcagatccacaaggtgcatttccttctacacaaggacactgtggcgtttaatgacaacagagatcccctcagtagctataacataattgcctgggactggaatggacccaagtggaccttcacggtcctcggttcctccacatggtctccagttcagctaaacataaatgagaccaaaatccagtggcacggaaaggacaaccaggtgcctaagtctgtgtgttccagcgactgtcttgaagggcaccagcgagtggttacgggtttccatcactgctgctttgagtgtgtgccctgtggggctgggaccttcctcaacaagagtgacctctacagatgccagccttgtgggaaagaagagtgggcacctgagggaagccagacctgcttcccgcgcactgtggtgtttttggctttgcgtgagcacacctcttgggtgctgctggcagctaacacgctgctgctgctgctgctgcttgggactgctggcctgtttgcctggcacctagacacccctgtggtgaggtcagcagggggccgcctgtgctttcttatgctgggctccctggcagcaggtagtggcagcctctatggcttctttggggaacccacaaggcctgcgtgcttgctacgccaggccctctttgcccttggtttcaccatcttcctgtcctgcctgacagttcgctcattccaactaatcatcatcttcaagttttccaccaaggtacctacattctaccacgcctgggtccaaaaccacggtgctggcctgtttgtgatgatcagctcagcggcccagctgcttatctgtctaacttggctggtggtgtggaccccactgcctgctagggaataccagcgcttcccccatctggtgatgcttgagtgcacagagaccaactccctgggcttcatactggccttcctctacaatggcctcctctccatcagtgcctttgcctgcagctacctgggtaaggacttgccagagaactacaacgaggccaaatgygtcaccttcagcctgctcttcaacttcgtgtcctggatcgccttcttcaccacggccagcgtctacgacggcaagtacctgcctgcggccaacatgatggctgggctgagcagcctgagcagcggcttcggtgggtattttctgcctaagtgctacgtgatcctctgccgcccagacctcaacagcacagagcacttccaggcctccattcaggactacacgaggcgctgcggctccacctga

SEQ ID NO: 135 - protein, 763 aa, Homo sapiens
  VARIANT (1)...(763): Xaa = Any Amino Acid
MRLGVEEINNSTALLPNITLGYQLYDVCXDSANVYATLRVLSLPGQHHIELQGDLLHYSPTVLAVIGPDSTNRAATTAALLSPFLVPMISYAASSETLSVKRQYPSFLRTIPNDKYQVETMVLLLQKFGWTWISLVGSSDDYGQLGVQALENQATGQGICIAFKDIMPFSAQVGDERMQCLMRHLAQAGATVVVVFSSRQLARVFFESVVLTNLTGKVWVASEAWALSRHITGVPGIQRIGMVLGVAIQKRAVPGLKAFEEAYARADKEAPRPCHKGSWCSSNQLCRECQAFMXHTMPKLKAFSMSSAYNAYRAVYAVAHGLHQLLGCASGACSRGRVYPWQLLEQIHKVHFLLHKDTVAFNDNRDPLSSYNIIAWDWNGPKWTFTVLGSSTWSPVQLNINETKIQWHGKDNQVPKSVCSSDCLEGHQRVVTGFHHCCFECVPCGAGTFLNKSDLYRCQPCGKEEWAPEGSQTCFPRTVVFLALREHTSWVLLAANTLLLLLLLGTAGLFAWHLDTPVVRSAGGRLCFLMLGSLAAGSGSLYGFFGEPTRPACLLRQALFALGFTIFLSCLTVRSFQLIIIFKFSTKVPTFYHAWVQNHGAGLFVMISSAAQLLICLTWLVVWTPLPAREYQRFPHLVMLECTETNSLGFILAFLYNGLLSISAFACSYLGKDLPENYNEAKCVTFSLLFNFVSWIAFFTTASVYDGKYLPAANMMAGLSSLSSGFGGYFLPKCYVILCRPDLNSTEHFQASIQDYTRRCGST

SEQ ID NO: 136 - DNA, 1101 bp, Homo sapiens
  CDS (1)...(1101)
atggtgctgctgctgcagaagttcgggtggacctggatctctctggttggcagcagtgacgactatgggcagctaggggtgcaggcactggagaaccaggccactggtcaggggatctgcattgctttcaaggacatcatgcccttctctgcccaggtgggcgatgagaggatgcagtgcctcatgcgccacctggcccaggccggggccaccgtcgtggttgttttttccagccggcagttggccagggtgtttttcgagtccgtggtgctgaccaacctgactggcaaggtgtgggtcgcctcagaagcctgggccctctccaggcacatcactggggtgcccgggatccagcgcattgggatggtgctgggcgtggccatccagaagagggctgtccctggcctgaaggcgtttgaagaagcctatgcccgggcagacaaggaggcccctaggccttgccacaagggctcctggtgcagcagcaatcagctctgcagagaatgccaagctttcatgrcacacacgatgcccaagctcaaagccttctccatgagttctgcctacaacgcataccgggctgtgtatgcggtggcccatggcctccaccagctcctgggctgtgcctctggagcttgttccaggggccgagtctacccctggcagcttttggagcagatccacaaggtgcatttccttctacacaaggacactgtggcgtttaatgacaacagagatcccctcagtagctataacataattgcctgggactggaatggacccaagtggaccttcacggtcctcggttcctccacatggtctccagttcagctaaacataaatgagaccaaaatccagtggcacggaaaggacaaccaggtgcctaagtctgtgtgttccagcgactgtcttgaagggcaccagcgagtggttacgggtttccatcactgctgctttgagtgtgtgccctgtggggctgggaccttcctcaacaagagttattcctactctgctcatctggctctcaggaaccttcttggctcttcctctttcagacctctacagatgccagccttgtgggaaagaagagtgggcacctga

SEQ ID NO: 137 - protein, 366 aa, Homo sapiens
  VARIANT (1)...(366): Xaa = Any Amino Acid
MVLLLQKFGWTWISLVGSSDDYGQLGVQALENQATGQGICIAFKDIMPFSAQVGDERMQCLMRHLAQAGATVVVVFSSRQLARVFFESVVLTNLTGKVWVASEAWALSRHITGVPGIQRIGMVLGVAIQKRAVPGLKAFEEAYARADKEAPRPCHKGSWCSSNQLCRECQAFMXHTMPKLKAFSMSSAYNAYRAVYAVAHGLHQLLGCASGACSRGRVYPWQLLEQIHKVHFLLHKDTVAFNDNRDPLSSYNIIAWDWNGPKWTFTVLGSSTWSPVQLNINETKIQWHGKDNQVPKSVCSSDCLEGHQRVVTGFHHCCFECVPCGAGTFLNKSYSYSAHLALRNLLGSSSFRPLQMPALWERRVGT

SEQ ID NO: 138 - DNA, 705 bp, Homo sapiens
  CDS (1)...(705)
atgctgggctccctggcagcaggtagtggcagcctctatggcttctttggggaacccacaaggcctgcgtgcttgctacgccaggccctctttgcccttggtttcaccatcttcctgtcctgcctgacagttcgctcattccaactaatcatcatcttcaagttttccaccaaggtacctacattctaccacgcctgggtccaaaaccacggtgctggcctgtttgtgatgatcagctcagcggcccagctgcttatctgtctaacttggctggtggtgtggaccccactgcctgctagggaataccagcgcttcccccatctggtgatgcttgagtgcacagagaccaactccctgggcttcatactggccttcctctacaatggcctcctctccatcagtgcctttgcctgcagctacctgggtaaggacttgccagagaactacaacgaggccaaatgygtcaccttcagcctgctcttcaacttcgtgtcctggatcgccttcttcaccacggccagcgtctacgacggcaagtacctgcctgcggccaacatgatggctgggctgagcagcctgagcagcggcttcggtgggtattttctgcctaagtgctacgtgatcctctgccgcccagacctcaacagcacagagcacttccaggcctccattcaggactacacgaggcgctgcggctccacctga

SEQ ID NO: 139 - protein, 234 aa, Homo sapiens
MLGSLAAGSGSLYGFFGEPTRPACLLRQALFALGFTIFLSCLTVRSFQLIIIFKFSTKVPTFYHAWVQNHGAGLFVMISSAAQLLICLTWLVVWTPLPAREYQRFPHLVMLECTETNSLGFILAFLYNGLLSISAFACSYLGKDLPENYNEAKCVTFSLLFNFVSWIAFFTTASVYDGKYLPAANMMAGLSSLSSGFGGYFLPKCYVILCRPDLNSTEHFQASIQDYTRRCGST

SEQ ID NO: 140 - DNA, 2951 bp, Homo sapiens
gtcactgggtgccacctggtttgcatctgtgccttcgtcctgcccagttcctgagtgggaccgcaggcccggaatgtcaaggcaaacagtcctgcttcagccactgggctccagtcccaccccttttgggggcctgaagttaggaagcatccggcagctgccttctatttaagcaactggcctccttagaggccactccttggccatgccaggcgcgggcatctggccagcatgctgctctgcacggctcgcctggtcggcctgcagcttctcatttcctgctgctgggcctttgcctgccatagcacggagtcttctcctgacttcaccctccccggagattacctcctggcaggcctgttccctctccattctggctgtctgcaggtgaggcacagacccgaggtgaccctgtgtgacaggtcttgtagcttcaatgagcatggctaccacctcttccaggctatgcggcttggggttgaggagataaacaactccacggccctgctgcccaacatcaccctggggtaccagctgtatgatgtgtgttytgactctgccaatgtgtatgccacgctgagagtgctctccctgccagggcaacaccacatagagctccaaggagaccttctccactattcccctacggtgctggcagtgattgggcctgacagcaccaaccgtgctgccaccacagccgccctgctgagccctttcctggtgcccatgattagctatgcggccagcagcgagacgctcagcgtgaagcggcagtatccctctttcctgcgcaccatccccaatgacaagtaccaggtggagaccatggtgctgctgctgcagaagttcgggtggacctggatctctctggttggcagcagtgacgactatgggcagctaggggtgcaggcactggagaaccaggccactggtcaggggatctgcattgctttcaaggacatcatgcccttctctgcccaggtgggcgatgagaggatgcagtgcctcatgcgccacctggcccaggccggggccaccgtcgtggttgttttttccagccggcagttggccagggtgtttttcgagtccgtggtgctgaccaacctgactggcaaggtgtgggtcgcctcagaagcctgggccctctccaggcacatcactggggtgcccgggatccagcgcattgggatggtgctgggcgtggccatccagaagagggctgtccctggcctgaaggcgtttgaagaagcctatgcccgggcagacaaggaggcccctaggccttgccacaagggctcctggtgcagcagcaatcagctctgcagagaatgccaagctttcatgrcacacacgatgcccaagctcaaagccttctccatgagttctgcctacaacgcataccgggctgtgtatgcggtggcccatggcctccaccagctcctgggctgtgcctctggagcttgttccaggggccgagtctacccctggcagcttttggagcagatccacaaggtgcatttccttctacacaaggacactgtggcgtttaatgacaacagagatcccctcagtagctataacataattgcctgggactggaatggacccaagtggaccttcacggtcctcggttcctccacatggtctccagttcagctaaacataaatgagaccaaaatccagtggcacggaaaggacaaccaggtgcctaagtctgtgtgttccagcgactgtcttgaagggcaccagcgagtggttacgggtttccatcactgctgctttgagtgtgtgccctgtggggctgggaccttcctcaacaagagtgacctctacagatgccagccttgtgggaaagaagagtgggcacctgagggaagccagacctgcttcccgcgcactgtggtgtttttggctttgcgtgagcacacctcttgggtgctgctggcagctaacacgctgctgctgctgctgctgcttgggactgctggcctgtttgcctggcacctagacacccctgtggtgaggtcagcagggggccgcctgtgctttcttatgctgggctccctggcagcaggtagtggcagcctctatggcttctttggggaacccacaaggcctgcgtgcttgctacgccaggccctctttgcccttggtttcaccatcttcctgtcctgcctgacagttcgctcattccaactaatcatcatcttcaagttttccaccaaggtacctacattctaccacgcctgggtccaaaaccacggtgctggcctgtttgtgatgatcagctcagcggcccagctgcttatctgtctaacttggctggtggtgtggaccccactgcctgctagggaataccagcgcttcccccatctggtgatgcttgagtgcacagagaccaactccctgggcttcatactggccttcctctacaatggcctcctctccatcagtgcctttgcctgcagctacctgggtaaggacttgccagagaactacaacgaggccaaatgygtcaccttcagcctgctcttcaacttcgtgtcctggatcgccttcttcaccacggccagcgtctacgacggcaagtacctgcctgcggccaacatgatggctgggctgagcagcctgagcagcggcttcggtgggtattttctgcctaagtgctacgtgatcctctgccgcccagacctcaacagcacagagcacttccaggcctccattcaggactacacgaggcgctgcggctccacctgaccagtgggtcagcaggcacggctggcagccttctctgccctgagggtcgaaggtcgagcaggccgggggtgtccgggaggtctttgggcatcgcggtctggggttgggacgtgtaagcgcctgggagagcctagaccaggctccgggctgccaataaagaagtgaaatgcgwaaaaaaaaaaaaaaaaaaaaaa

SEQ ID NO: 141 - DNA, 2733 bp, Homo sapiens
  CDS (1)...(2733)
atgaaagttggagtgctgtggctcatttctttcttcaccttcactgacggccacggtggcttcctggggaaaaatgatggcatcaaaacaaaaaaagaactcattgtgaataagaaaaaacatctaggcccagtcgaagaatatcagctgctgcttcaggtgacctatagagattccaaggagaaaagagatttgagaaattttctgaagctcttgaagcctccattattatggtcacatgggctaattagaattatcagagcaaaggctaccacagactgcaacagcctgaatggagtcctgcagtgtacctgtgaagacagctacacctggtttcctccctcatgccttgatccccagaactgctaccttcacacggctggagcactcccaagctgtgaatgtcatctcaacaacctcagccagagtgtcaatttctgtgagagaacaaagatttggggcactttcaaaattaatgaaaggtttacaaatgaccttttgaattcatcttctgctatatactccaaatatgcaaatggaattgaaattcaacttaaaaaagcatatgaaagaattcaaggttttgagtcggttcaggtcacccaatttcgaaatggaagcatcgttgctgggtatgaagttgttggctccagcagtgcatctgaactgctgtcagccattgaacatgttgccgagaaggctaagacagcccttcacaagctgtttccattagaagacggctctttcagagtgttcggaaaagcccagtgtaatgacattgtctttggatttgggtccaaggatgatgaatataccctgccctgcagcagtggctacaggggaaacatcacagccaagtgtgagtcctctgggtggcaggtcatcagggagacttgtgtgctctctctgcttgaagaactgaacaagaatttcagtatgattgtaggcaatgccactgaggcagctgtgtcatccttcgtgcaaaatctttctgtcatcattcggcaaaacccatcaaccacagtggggaatctggcttcggtggtgtcgattctgagcaatatttcatctctgtcactggccagccatttcagggtgtccaattcaacaatggaggatgtcatcagtatagctgacaatatccttaattcagcctcagtaaccaactggacagtcttactgcgggaagaaaagtatgccagctcacggttactagagacattagaaaacatcagcactctggtgcctccgacagctcttcctctgaatttttctcggaaattcattgactggaaagggattccagtgaacaaaagccaactcaaaaggggttacagctatcagattaaaatgtgtccccaaaatacatctattcccatcagaggccgtgtgttaattgggtcagaccaattccagagatcccttccagaaactattatcagcatggcctcgttgactctggggaacattctacccgtttccaaaaatggaaatgctcaggtcaatggacctgtgatatccacggttattcaaaactattccataaatgaagttttcctatttttttccaagatagagtcaaacctgagccagcctcattgtgtgttttgggatttcagtcatttgcagtggaacgatgcaggctgccacctagtgaatgaaactcaagacatcgtgacgtgccaatgtactcacttgacctccttctccatattgatgtcaccttttgtcccctctacaatcttccccgttgtaaaatggatcacctatgtgggactgggtatctccattggaagtctcattttatgcctgatcatcgaggctttgttttggaagcagattaaaaaaagccaaacctctcacacacgtcgtatttgcatggtgaacatagccctgtccctcttgattgctgatgtctggtttattgttggtgccacagtggacaccacggtgaacccttctggagtctgcacagctgctgtgttctttacacacttcttctacctctctttgttcttctggatgctcatgcttggcatcctgctggcttaccggatcatcctcgtgttccatcacatggcccagcatttgatgatggctgttggattttgcctgggttatgggtgccctctcattatatctgtcattaccattgctgtcacgcaacctagcaatacctacaaaaggaaagatgtgtgttggcttaactggtccaatggaagcaaaccactcctggcttttgttgtccctgcactggctattgtggctgtgaacttcgttgtggtgctgctagttctcacaaagctctggaggccgactgttggggaaagactgagtcgggatgacaaggccaccatcatccgcgtggggaagagcctcctcattctgacccctctgctagggctcacctggggctttggaataggaacaatagtggacagccagaatctggcttggcatgttatttttgctttactcaatgcattccagggattttttatcttatgctttggaatactcttggacagtaagctgcgacaacttctgttcaacaagttgtctgccttaagttcttggaagcaaacagaaaagcaaaactcatcagatttatctgccaaacccaaattctcaaagcctttcaacccactgcaaaacaaaggccattatgcattttctcatactggagattcctccgacaacatcatgctaactcagtttgtctcaaatgaataa

SEQ ID NO: 142 - protein, 910 aa, Homo sapiens
MKVGVLWLISFFTFTDGHGGFLGKNDGIKTKKELIVNKKKHLGPVEEYQLLLQVTYRDSKEKRDLRNFLKLLKPPLLWSHGLIRIIRAKATTDCNSLNGVLQCTCEDSYTWFPPSCLDPQNCYLHTAGALPSCECHLNNLSQSVNFCERTKIWGTFKINERFTNDLLNSSSAIYSKYANGIEIQLKKAYERIQGFESVQVTQFRNGSIVAGYEVVGSSSASELLSAIEHVAEKAKTALHKLFPLEDGSFRVFGKAQCNDIVFGFGSKDDEYTLPCSSGYRGNITAKCESSGWQVIRETCVLSLLEELNKNFSMIVGNATEAAVSSFVQNLSVIIRQNPSTTVGNLASVVSILSNISSLSLASHFRVSNSTMEDVISIADNILNSASVTNWTVLLREEKYASSRLLETLENISTLVPPTALPLNFSRKFIDWKGIPVNKSQLKRGYSYQIKMCPQNTSIPIRGRVLIGSDQFQRSLPETIISMASLTLGNILPVSKNGNAQVNGPVISTVIQNYSINEVFLFFSKIESNLSQPHCVFWDFSHLQWNDAGCHLVNETQDIVTCQCTHLTSFSILMSPFVPSTIFPVVKWITYVGLGISIGSLILCLIIEALFWKQIKKSQTSHTRRICMVNIALSLLIADVWFIVGATVDTTVNPSGVCTAAVFFTHFFYLSLFFWMLMLGILLAYRIILVFHHMAQHLMMAVGFCLGYGCPLIISVITIAVTQPSNTYKRKDVCWLNWSNGSKPLLAFVVPALAIVAVNFVVVLLVLTKLWRPTVGERLSRDDKATIIRVGKSLLILTPLLGLTWGFGIGTIVDSQNLAWHVIFALLNAFQGFFILCFGILLDSKLRQLLFNKLSALSSWKQTEKQNSSDLSAKPKFSKPFNPLQNKGHYAFSHTGDSSDNIMLTQFVSNE

SEQ ID NO: 143 - DNA, 1797 bp, Homo sapiens
  CDS (1)...(1797)
atgattgtaggcaatgccactgaggcagctgtgtcatccttcgtgcaaaatctttctgtcatcattcggcaaaacccatcaaccacagtggggaatctggcttcggtggtgtcgattctgagcaatatttcatctctgtcactggccagccatttcagggtgtccaattcaacaatggaggatgtcatcagtatagctgacaatatccttaattcagcctcagtaaccaactggacagtcttactgcgggaagaaaagtatgccagctcacggttactagagacattagaaaacatcagcactctggtgcctccgacagctcttcctctgaatttttctcggaaattcattgactggaaagggattccagtgaacaaaagccaactcaaaaggggttacagctatcagattaaaatgtgtccccaaaatacatctattcccatcagaggccgtgtgttaattgggtcagaccaattccagagatcccttccagaaactattatcagcatggcctcgttgactctggggaacattctacccgtttccaaaaatggaaatgctcaggtcaatggacctgtgatatccacggttattcaaaactattccataaatgaagttttcctatttttttccaagatagagtcaaacctgagccagcctcattgtgtgttttgggatttcagtcatttgcagtggaacgatgcaggctgccacctagtgaatgaaactcaagacatcgtgacgtgccaatgtactcacttgacctccttctccatattgatgtcaccttttgtcccctctacaatcttccccgttgtaaaatggatcacctatgtgggactgggtatctccattggaagtctcattttatgcctgatcatcgaggctttgttttggaagcagattaaaaaaagccaaacctctcacacacgtcgtatttgcatggtgaacatagccctgtccctcttgattgctgatgtctggtttattgttggtgccacagtggacaccacggtgaacccttctggagtctgcacagctgctgtgttctttacacacttcttctacctctctttgttcttctggatgctcatgcttggcatcctgctggcttaccggatcatcctcgtgttccatcacatggcccagcatttgatgatggctgttggattttgcctgggttatgggtgccctctcattatatctgtcattaccattgctgtcacgcaacctagcaatacctacaaaaggaaagatgtgtgttggcttaactggtccaatggaagcaaaccactcctggcttttgttgtccctgcactggctattgtggctgtgaacttcgttgtggtgctgctagttctcacaaagctctggaggccgactgttggggaaagactgagtcgggatgacaaggccaccatcatccgcgtggggaagagcctcctcattctgacccctctgctagggctcacctggggctttggaataggaacaatagtggacagccagaatctggcttggcatgttatttttgctttactcaatgcattccagggattttttatcttatgctttggaatactcttggacagtaagctgcgacaacttctgttcaacaagttgtctgccttaagttcttggaagcaaacagaaaagcaaaactcatcagatttatctgccaaacccaaattctcaaagcctttcaacccactgcaaaacaaaggccattatgcattttctcatactggagattcctccgacaacatcatgctaactcagtttgtctcaaatgaataa

SEQ ID NO: 144 - protein, 598 aa, Homo sapiens
MIVGNATEAAVSSFVQNLSVIIRQNPSTTVGNLASVVSILSNISSLSLASHFRVSNSTMEDVISIADNILNSASVTNWTVLLREEKYASSRLLETLENISTLVPPTALPLNFSRKFIDWKGIPVNKSQLKRGYSYQIKMCPQNTSIPIRGRVLIGSDQFQRSLPETIISMASLTLGNILPVSKNGNAQVNGPVISTVIQNYSINEVFLFFSKIESNLSQPHCVFWDFSHLQWNDAGCHLVNETQDIVTCQCTHLTSFSILMSPFVPSTIFPVVKWITYVGLGISIGSLILCLIIEALFWKQIKKSQTSHTRRICMVNIALSLLIADVWFIVGATVDTTVNPSGVCTAAVFFTHFFYLSLFFWMLMLGILLAYRIILVFHHMAQHLMMAVGFCLGYGCPLIISVITIAVTQPSNTYKRKDVCWLNWSNGSKPLLAFVVPALAIVAVNFVVVLLVLTKLWRPTVGERLSRDDKATIIRVGKSLLILTPLLGLTWGFGIGTIVDSQNLAWHVIFALLNAFQGFFILCFGILLDSKLRQLLFNKLSALSSWKQTEKQNSSDLSAKPKFSKPFNPLQNKGHYAFSHTGDSSDNIMLTQFVSNE

SEQ ID NO: 145 - DNA, 618 bp, Homo sapiens
  CDS (1)...(618)
atgggggctgcctttgtcgctagcctccgcagtaacctttcttctgccacttcaaggtcagagatgaacagcagtgttggggacctgggtgttggcggctgcagcctctgggatgaccctgctcgcttcatcgtggtgcccgcggcctatgccttggcactgggcctggggctgccagccaacgtggcggccctggcaatgttcatccgcagcggcgggcgcctgggccaggccctgcttctctacctgttcaacctggctctggttgatgagttcttcacgctcacgctgcagctgtggctcacctactacctgggcctggcccggaggccgcctgccacgcggccggggccacctactacgtgtccacctatgcggcggtggtcttcgccgcgctcatcagcgtgtgccgctgcggcttcgtacgcggtcccgggcccagggcggctgcccgcctggcccggtgcctacggbgccccgcgcgcgctgcctgcgccttcgcctggctggcgggcctggcccctccctgcctggagcaccgctgggcaagctcggggctggcctccgccacggtggccttcgcggccgccttcctgctggtgctcgcggccaacgtga

SEQ ID NO: 146 - protein, 205 aa, Homo sapiens
  VARIANT (1)...(205): Xaa = Any Amino Acid
MGAAFVASLRSNLSSATSRSEMNSSVGDLGVGGCSLWDDPARFIVVPAAYALALGLGLPANVAALAMFIRSGGRLGQALLLYLFNLALVDEFFTLTLQLWLTYYLGLARRPPATRPGPPTTCPPMRRWSSPRSSACAAAASYAVPGPGRLPAWPGAYXAPRALPAPSPGWRAWPLPAWSTAGQARGWPPPRWPSRPPSCWCSRPT

SEQ ID NO: 147 - DNA, 2098 bp, Homo sapiens
tggaaaggcctcttctttatatttcagcctgtttctccagaactccctgttggctcagtcctacgtgggtttactgcacaggtctgtggcccaacatgtatgaaccatactccatctgtgaggggcatctctaccctctcagtcactaaggttggaaatttccaagttatctaggactcctgcctcttcctcgcttcccacagtttgtcaccaaaaactctggagtccataccctcctctcagcagctgctggccaggttcggtcttcattccctctcacatggactctgcctctagtgtcccctcccagcaagggctgaagaagaggagactggggtgggagaaggtggaatgggggctgcctttgtcgctagcctccgcagtaacctttcttctgccacttcaaggtcagagatgaacagcagtgttggggacctgggtgttggcggctgcagcctctgggatgaccctgctcgcttcatcgtggtgcccgcggcctatgccttggcactgggcctggggctgccagccaacgtggcggccctggcaatgttcatccgcagcggcgggcgcctgggccaggccctgcttctctacctgttcaacctggctctggttgatgagttcttcacgctcacgctgcagctgtggctcacctactacctgggcctggcccggaggccgcctgccacgcggccggggccacctactacgtgtccacctatgcggcggtggtcttcgccgcgctcatcagcgtgtgccgctgcggcttcgtacgcggtcccgggcccagggcggctgcccgcctggcccggtgcctacggcgccccgcgcgcgctgcctgcgccttcgcctggctggcgggcctggcccctccctgcctggagcaccgctgggcaagctcggggctggcctccgccacggtggccttcgcggccgccttcctgctggtgctcgcggccaacgtgagcctggcgcgggcgctcaaggcgccctctggcccgggcccgggccctgcaaccgccggcgcgcaccggcgcgcggccaagaccatggtcctggggttcctgctggtcttcgccctcagtctggcgcccaaccacctgctgctggcgccctaggtggctgggggggaagacaacggagaccggtgtcgcgccgcctccacgctcgacatcctgcacaccctcagcctggcgctgctgagcctcaacagctgcctggacccactcatctgctgcttcttcgtgcgcctcttccaccaggactgctgctgggcactgagctgccgcctggtgaagggggcgcccagggcgcatggggcctccttggcctcctcttggagagtctcctggcctcccctcctgtctcacccccctgtcaccctcccagtggcatccagggtggagaaagctctttggaaagacctagattctaatcctgacgcaaccacatactacccctgtagctgtgaacctcccagtcaccttcttaggcccgggaaaatgccggtctcctactcttcatggcctttgtacctgacttggccaggaatgatctctgttcctctctttcactaagttagttcttcttcaccctcacttcctctaaagtaactccttatagggaagcctttcttggctggcaacacacacacacacacacacacacacatacacacacgagtgaatcagatcggaktgctctttgatagctcttttcataattgtaatcaagcaattaattgggtaatgcggtggtggtgttttctttctctcttgccagaatgtattcatgttgacccataagacattatcatttttataagcccccaaaagttgaatattggaaattttatttccacccaattcaacttaataaattctgtgtttaccttgcwmaaaaaaaaaaaaaaaaaaaaaatcactgctgtatctcctgtggttggcactgcgccttgcatataataagagctcagtgtatcagatgcgtgagtgaaaactgaatatcattaatttaaattgcttaagtactcactcacacattccaagtctgtgatagcttttccctcaagtgtgtgtgagattctccaagcttg

SEQ ID NO: 148 - DNA, 3774 bp, Homo sapiens
  CDS (1)...(3774)
atggaaaattcagaaagagctgaagaaatgcaagaaaattatcagagaaatggaactgcagaagaacagccaaaactgagaaaggaagcagttggatctattgagatattccgctttgctgatggactggacatcacactcatgatcctgggtatactggcatcactggtcaatggagcctgccttcctttaatgccactggttttaggagaaatgagtgataaccttattagtggatgtctagtccaaactaacacatcaaattatcagaactgtactcagtctcaagagaagctgaatgaagatatgactctgttgcccctgtattatgttggaataggtgttgctgccttgatttttggttacatacagatttccttgtggattataactgcagcacgacagaccaagaggattcgaaaacagttttttcattcagttttggcacaggacatcggctggtttgatagctgtgacatcggtgaacttaacactcgcatgacagatgacattgacaaaatcagtgatggtattggagataagattgctctgttgtttcaaaacatgtctactttttcgattggcctggcagttggtttggttaagggctggaaactcaccctagtgactctatccacgtctcctcttataatggcttcagcggcagcatgttctaggatggtcatctcattgcccagtaaggaattaagtgcctattccaaagctggggctgtggcagaagaagtcttgtcatcaatccgaacagtcatagcctttagggcccaggagaaagaacttcaaaggtatacacagaatctcaaagatgcaaaggattttggcataaaaaggactatagcttcaaaagtgtctcttggtgctgtgtacttctttatgaatggaacctatggacttgctttttggtatggaacctccttgattcttaatggagaacctggatataccatcgggactgttcttgctgttttctttagtgtaatccatagcagttattgcattggagcagcagtccctcactttgaaaccttcgcaatagcccgaggagctgcctttcatattttccaggttattgataagaaacccagtatagataacttttccacagctggatataaacctgaatccatagaaggaactgtggaatttaaaaatgtttctttcaattatccatcaagaccatctatcaagattctgaaaggtctgaatctcagaattaagtctggagagacagtcgccttggtcggtctcaatgccagtggaaagagtacggtagtccagcttctgcagaggttatatgatccggatgatggctttatcatggtggatgagaatgacatcagagctttaaatgtgcggcattatcgagaccatattggagtggttagtcaagagcctgttttgttcgggaccaccatcagtaacaatatcaagtatggacragatgatgtgactgatgaagagatggagagagcagcaagggaagcaaatgcgtatgattttatcatggagtttcctaataaatttaatacattggtaggggaaaaaggagctcaaatgagtggagggcagaaacagaggatcgcaattgctcgtgccttagttcgaaaccccaagattctgattttagatgaggctacgtctgccctggattcagaaagcragtcagctgttcaagctgcactggagaaggcgagcaaaggtcggactacaatcgtggtagcacaccgactttctactattcgaagtgcagatttgattgtgaccctaaaggatggaatgctggcggagaaaggagcacatgctgaactaatggcaaaacgaggtctatattattcacttgtgatgtcacaggatattaaaaaagctgatgaacagatggagtcaatgacatattctactgaaagaaagaccaactcacttcctctgcactctgtgaagagcatcaagtcagacttcattgacaaggctgaggaatccacccaatctaaagagataagtcttcctgaagtctctctattaaaaattttaaagttaaacaagcctgaatggccttttgtggttctggggacattggcttctgttctaaatggaactgttcatccagtattttccatcatctttgcaaaaattataaccatgtttggaaataatgataaaaccacattaaagcatgatgcagaaatttattccatgatattcgtcattttgggtgttatttgctttgtcagttatttcatgcagggattattttacggcagagcaggggaaattttaccgatgagattaagacacttggccttcaaagccatgttatatcaggatattgcctggtttgatgaaaaggaaaacagcacaggaggcttgacaacaatattagccatagatatagcacaaattcaaggagcaacaggttccaggattggcgtcttaacacaaaatgcaactaacatgggactttcagttatcatttcctttatatatggatgggagatgacattcctgattctgagtattgctccagtacttgccgtgacaggaatgattgaaaccgcagcaatgactggatttgccaacaaagataagcaagaacttaagcatgctggaaagatagcaactgaagctttggagaatatacgtactatagtgtcattaacaagggaaaaagccttcgagcaaatgtatgaagagatgcttcagactcaacacagaaatacctcgaagaaagcacagattattggaagctgttatgcattcagccatgcctttatatattttgcctatgcagcagggtttcgatttggagcctatttaattcaagctggacgaatgaccccagagggcatgttcatagtttttactgcaattgcatatggagctatggccatcggaaaaacgctcgttttggctcctgaatattccaaagccaaatcgggggctgcgcatctgtttgccttgttggaaaagaaaccaaatatagacagccgcagtcaagaagggaaaaagccagacacatgtgaagggaatttagagtttcgagaagtctctttcttctatccatgtcgcccagatgttttcatcctccgtggcttatccctcagtattgagcgaggaaagacagtagcatttgtggggagcagcggctgtgggaaaagcacttctgttcaacttctgcagagactttatgaccccgtgcaaggacaagtgctgtttgatggtgtggatgcaaaagaattgaatgtacagtggctccgttcccaaatagcaatcgttcctcaagagcctgtgctcttcaactgcagcattgctgagaacatcgcctatggtgacaacagccgtgtggtgccattagatgagatcaaagaagccgcaaatgcagcaaatatccattcttttattgaaggtctccctgagaaatacaacacacaagttggactgaaaggagcacagctttctggcggccagaaacaaagactagctattgcaagggctcttctccaaaaacccaaaattttattgktggatgaggccacttcagccctcgataatgacagtgagaaggtggttcagcatgcccttgataaagccaggacgggaaggacatgcctagtggtcactcacaggctctctgcaattcagaacgcagatttgatagtggttctgcacaatggaaagataaaggaacaaggaactcatcaagagctcctgagaaatcgagacatatattttaagttagtgaatgcacagtcagtgcagtga

SEQ ID NO: 149 - protein, 1257 aa, Homo sapiens
  VARIANT (1)...(1257): Xaa = Any Amino Acid
MENSERAEEMQENYQRNGTAEEQPKLRKEAVGSIEIFRFADGLDITLMILGILASLVNGACLPLMPLVLGEMSDNLISGCLVQTNTSNYQNCTQSQEKLNEDMTLLPLYYVGIGVAALIFGYIQISLWIITAARQTKRIRKQFFHSVLAQDIGWFDSCDIGELNTRMTDDIDKISDGIGDKIALLFQNMSTFSIGLAVGLVKGWKLTLVTLSTSPLIMASAAACSRMVISLPSKELSAYSKAGAVAEEVLSSIRTVIAFRAQEKELQRYTQNLKDAKDFGIKRTIASKVSLGAVYFFMNGTYGLAFWYGTSLILNGEPGYTIGTVLAVFFSVIHSSYCIGAAVPHFETFAIARGAAFHIFQVIDKKPSIDNFSTAGYKPESIEGTVEFKNVSFNYPSRPSIKILKGLNLRIKSGETVALVGLNASGKSTVVQLLQRLYDPDDGFIMVDENDIRALNVRHYRDHIGVVSQEPVLFGTTISNNIKYGXDDVTDEEMERAAREANAYDFIMEFPNKFNTLVGEKGAQMSGGQKQRIAIARALVRNPKILILDEATSALDSESXSAVQAALEKASKGRTTIVVAHRLSTIRSADLIVTLKDGMLAEKGAHAELMAKRGLYYSLVMSQDIKKADEQMESMTYSTERKTNSLPLHSVKSIKSDFIDKAEESTQSKEISLPEVSLLKILKLNKPEWPFVVLGTLASVLNGTVHPVFSIIFAKIITMFGNNDKTTLKHDAEIYSMIFVILGVICFVSYFMQGLFYGRAGEILPMRLRHLAFKAMLYQDIAWFDEKENSTGGLTTILAIDIAQIQGATGSRIGVLTQNATNMGLSVIISFIYGWEMTFLILSIAPVLAVTGMIETAAMTGFANKDKQELKHAGKIATEALENIRTIVSLTREKAFEQMYEEMLQTQHRNTSKKAQIIGSCYAFSHAFIYFAYAAGFRFGAYLIQAGRMTPEGMFIVFTAIAYGAMAIGKTLVLAPEYSKAKSGAAHLFALLEKKPNIDSRSQEGKKPDTCEGNLEFREVSFFYPCRPDVFILRGLSLSIERGKTVAFVGSSGCGKSTSVQLLQRLYDPVQGQVLFDGVDAKELNVQWLRSQIAIVPQEPVLFNCSIAENIAYGDNSRVVPLDEIKEAANAANIHSFIEGLPEKYNTQVGLKGAQLSGGQKQRLAIARALLQKPKILLXDEATSALDNDSEKVVQHALDKARTGRTCLVVTHRLSAIQNADLIVVLHNGKIKEQGTHQELLRNRDIYFKLVNAQSVQ

SEQ ID NO: 150 - DNA, 3477 bp, Homo sapiens
  CDS (1)...(3477)
atggaaaattcagaaagagctgaagaaatgcaagaaaattatcagagaaatggaactgcagaagaacagccaaaactgagaaaggaagcagttggatctattgagatattccgctttgctgatggactggacatcacactcatgatcctgggtatactggcatcactggtcaatggagcctgccttcctttaatgccactggttttaggagaaatgagtgataaccttattagtggatgtctagtccaaactaacacatcaaattatcagaactgtactcagtctcaagagaagctgaatgaagatatgactctgttgcccctgtattatgttggaataggtgttgctgccttgatttttggttacatacagatttccttgtggattataactgcagcacgacagaccaagaggattcgaaaacagttttttcattcagttttggcacaggacatcggctggtttgatagctgtgacatcggtgaacttaacactcgcatgacagatgacattgacaaaatcagtgatggtattggagataagattgctctgttgtttcaaaacatgtctactttttcgattggcctggcagttggtttggttaagggctggaaactcaccctagtgactctatccacgtctcctcttataatggcttcagcggcagcatgttctaggatggtcatctcattgcccagtaaggaattaagtgcctattccaaagctggggctgtggcagaagaagtcttgtcatcaatccgaacagtcatagcctttagggcccaggagaaagaacttcaaaggtatacacagaatctcaaagatgcaaaggattttggcataaaaaggactatagcttcaaaagtgtctcttggtgctgtgtacttctttatgaatggaacctatggacttgctttttggtatggaacctccttgattcttaatggagaacctggatataccatcgggactgttcttgctgttttctttagtgtaatccatagcagttattgcattggagcagcagtccctcactttgaaaccttcgcaatagcccgaggagctgcctttcatattttccaggttattgataagaaacccagtatagataacttttccacagctggatataaacctgaatccatagaaggaactgtggaatttaaaaatgtttctttcaattatccatcaagaccatctatcaagattctgaaaggtctgaatctcagaattaagtctggagagacagtcgccttggtcggtctcaatgccagtggaaagagtacggtagtccagcttctgcagaggttatatgatccggatgatggctttatcatggtggatgagaatgacatcagagctttaaatgtgcggcattatcgagaccatattggagtggttagtcaagagcctgttttgttcgggaccaccatcagtaacaatatcaagtatggacragatgatgtgactgatgaagagatggagagagcagcaagggaagcaaatgcgtatgattttatcatggagtttcctaataaatttaatacattggtaggggaaaaaggagctcaaatgagtggagggcagaaacagaggatcgcaattgctcgtgccttagttcgaaaccccaagattctgattttagatgaggctacgtctgccctggattcagaaagcragtcagctgttcaagctgcactggagaaggcgagcaaaggtcggactacaatcgtggtagcacaccgactttctactattcgaagtgcagatttgattgtgaccctaaaggatggaatgctggcggagaaaggagcacatgctgaactaatggcaaaacgaggtctatattattcacttgtgatgtcacaggatattaaaaaagctgatgaacagatggagtcaatgacatattctactgaaagaaagaccaactcacttcctctgcactctgtgaagagcatcaagtcagacttcattgacaaggctgaggaatccacccaatctaaagagataagtcttcctgaagtctctctattaaaaattttaaagttaaacaagcctgaatggccttttgtggttctggggacattggcttctgttctaaatggaactgttcatccagtattttccatcatctttgcaaaaattataaccatgtttggaaataatgataaaaccacattaaagcatgatgcagaaatttattccatgatattcgtcattttgggtgttatttgctttgtcagttatttcatgcagggattattttacggcagagcaggggaaattttaccgatgagattaagacacttggccttcaaagccatgttatatcaggatattgcctggtttgatgaaaaggaaaacagcacaggaggcttgacaacaatattagccatagatatagcacaaattcaaggagcaacaggttccaggattggcgtcttaacacaaaatgcaactaacatgggactttcagttatcatttcctttatatatggatgggagatgacattcctgattctgagtattgctccagtacttgccgtgacaggaatgattgaaaccgcagcaatgactggatttgccaacaaagataagcaagaacttaagcatgctggaaagatagcaactgaagctttggagaatatacgtactatagtgtcattaacaagggaaaaagccttcgagcaaatgtatgaagagatgcttcagactcaacacagaaatacctcgaagaaagcacagattattggaagctgttatgcattcagccatgcctttatatattttgcctatgcagcagggtttcgatttggagcctatttaattcaagctggacgaatgaccccagagggcatgttcatagtttttactgcaattgcatatggagctatggccatcggaaaaacgctcgttttggctcctgaatattccaaagccaaatcgggggctgcgcatctgtttgccttgttggaaaagaaaccaaatatagacagccgcagtcaagaagggaaaaagccagacacatgtgaagggaatttagagtttcgagaagtctctttcttctatccatgtcgcccagatgttttcatcctccgtggcttatccctcagtattgagcgaggaaagacagtagcatttgtggggagcagcggctgtgggaaaagcacttctgttcaacttctgcagagactttatgaccccgtgcaaggacaagtgctgtttgatggtgtggatgcaaaagaattgaatgtacagtggctccgttcccaaatagcaatcgttcctcaagagcctgtgctcttcaactgcagcattgctgagaacatcgcctatggtgacaacagccgtgtggtgccattagatgagatcaaagaagccgcaaatgcagcaaatatccattcttttattgaaggtctccctgagtggttcagcatgcccttgataaagccaggacgggaaggacatgcctag

SEQ ID NO: 151 - protein, 1158 aa, Homo sapiens
  VARIANT (1)...(1158): Xaa = Any Amino Acid
MENSERAEEMQENYQRNGTAEEQPKLRKEAVGSIEIFRFADGLDITLMILGILASLVNGACLPLMPLVLGEMSDNLISGCLVQTNTSNYQNCTQSQEKLNEDMTLLPLYYVGIGVAALIFGYIQISLWIITAARQTKRIRKQFFHSVLAQDIGWFDSCDIGELNTRMTDDIDKISDGIGDKIALLFQNMSTFSIGLAVGLVKGWKLTLVTLSTSPLIMASAAACSRMVISLPSKELSAYSKAGAVAEEVLSSIRTVIAFRAQEKELQRYTQNLKDAKDFGIKRTIASKVSLGAVYFFMNGTYGLAFWYGTSLILNGEPGYTIGTVLAVFFSVIHSSYCIGAAVPHFETFAIARGAAFHIFQVIDKKPSIDNFSTAGYKPESIEGTVEFKNVSFNYPSRPSIKILKGLNLRIKSGETVALVGLNASGKSTVVQLLQRLYDPDDGFIMVDENDIRALNVRHYRDHIGVVSQEPVLFGTTISNNIKYGXDDVTDEEMERAAREANAYDFIMEFPNKFNTLVGEKGAQMSGGQKQRIAIARALVRNPKILILDEATSALDSESXSAVQAALEKASKGRTTIVVAHRLSTIRSADLIVTLKDGMLAEKGAHAELMAKRGLYYSLVMSQDIKKADEQMESMTYSTERKTNSLPLHSVKSIKSDFIDKAEESTQSKEISLPEVSLLKILKLNKPEWPFVVLGTLASVLNGTVHPVFSIIFAKIITMFGNNDKTTLKHDAEIYSMIFVILGVICFVSYFMQGLFYGRAGEILPMRLRHLAFKAMLYQDIAWFDEKENSTGGLTTILAIDIAQIQGATGSRIGVLTQNATNMGLSVIISFIYGWEMTFLILSIAPVLAVTGMIETAAMTGFANKDKQELKHAGKIATEALENIRTIVSLTREKAFEQMYEEMLQTQHRNTSKKAQIIGSCYAFSHAFIYFAYAAGFRFGAYLIQAGRMTPEGMFIVFTAIAYGAMAIGKTLVLAPEYSKAKSGAAHLFALLEKKPNIDSRSQEGKKPDTCEGNLEFREVSFFYPCRPDVFILRGLSLSIERGKTVAFVGSSGCGKSTSVQLLQRLYDPVQGQVLFDGVDAKELNVQWLRSQIAIVPQEPVLFNCSIAENIAYGDNSRVVPLDEIKEAANAANIHSFIEGLPEWFSMPLIKPGREGHA

SEQ ID NO: 152 - DNA, 3939 bp, Homo sapiens
ttcaactgactggatggggcccactcaaaacagcatctaaggaattaaaaagaagtaaattgtaaataagatggaaaattcagaaagagctgaagaaatgcaagaaaattatcagagaaatggaactgcagaagaacagccaaaactgagaaaggaagcagttggatctattgagatattccgctttgctgatggactggacatcacactcatgatcctgggtatactggcatcactggtcaatggagcctgccttcctttaatgccactggttttaggagaaatgagtgataaccttattagtggatgtctagtccaaactaacacatcaaattatcagaactgtactcagtctcaagagaagctgaatgaagatatgactctgttgcccctgtattatgttggaataggtgttgctgccttgatttttggttacatacagatttccttgtggattataactgcagcacgacagaccaagaggattcgaaaacagttttttcattcagttttggcacaggacatcggctggtttgatagctgtgacatcggtgaacttaacactcgcatgacagatgacattgacaaaatcagtgatggtattggagataagattgctctgttgtttcaaaacatgtctactttttcgattggcctggcagttggtttggttaagggctggaaactcaccctagtgactctatccacgtctcctcttataatggcttcagcggcagcatgttctaggatggtcatctcattgcccagtaaggaattaagtgcctattccaaagctggggctgtggcagaagaagtcttgtcatcaatccgaacagtcatagcctttagggcccaggagaaagaacttcaaaggtatacacagaatctcaaagatgcaaaggattttggcataaaaaggactatagcttcaaaagtgtctcttggtgctgtgtacttctttatgaatggaacctatggacttgctttttggtatggaacctccttgattcttaatggagaacctggatataccatcgggactgttcttgctgttttctttagtgtaatccatagcagttattgcattggagcagcagtccctcactttgaaaccttcgcaatagcccgaggagctgcctttcatattttccaggttattgataagaaacccagtatagataacttttccacagctggatataaacctgaatccatagaaggaactgtggaatttaaaaatgtttctttcaattatccatcaagaccatctatcaagattctgaaaggtctgaatctcagaattaagtctggagagacagtcgccttggtcggtctcaatgccagtggaaagagtacggtagtccagcttctgcagaggttatatgatccggatgatggctttatcatggtggatgagaatgacatcagagctttaaatgtgcggcattatcgagaccatattggagtggttagtcaagagcctgttttgttcgggaccaccatcagtaacaatatcaagtatggacragatgatgtgactgatgaagagatggagagagcagcaagggaagcaaatgcgtatgattttatcatggagtttcctaataaatttaatacattggtaggggaaaaaggagctcaaatgagtggagggcagaaacagaggatcgcaattgctcgtgccttagttcgaaaccccaagattctgattttagatgaggctacgtctgccctggattcagaaagcragtcagctgttcaagctgcactggagaaggcgagcaaaggtcggactacaatcgtggtagcacaccgactttctactattcgaagtgcagatttgattgtgaccctaaaggatggaatgctggcggagaaaggagcacatgctgaactaatggcaaaacgaggtctatattattcacttgtgatgtcacaggatattaaaaaagctgatgaacagatggagtcaatgacatattctactgaaagaaagaccaactcacttcctctgcactctgtgaagagcatcaagtcagacttcattgacaaggctgaggaatccacccaatctaaagagataagtcttcctgaagtctctctattaaaaattttaaagttaaacaagcctgaatggccttttgtggttctggggacattggcttctgttctaaatggaactgttcatccagtattttccatcatctttgcaaaaattataaccatgtttggaaataatgataaaaccacattaaagcatgatgcagaaatttattccatgatattcgtcattttgggtgttatttgctttgtcagttatttcatgcagggattattttacggcagagcaggggaaattttaccgatgagattaagacacttggccttcaaagccatgttatatcaggatattgcctggtttgatgaaaaggaaaacagcacaggaggcttgacaacaatattagccatagatatagcacaaattcaaggagcaacaggttccaggattggcgtcttaacacaaaatgcaactaacatgggactttcagttatcatttcctttatatatggatgggagatgacattcctgattctgagtattgctccagtacttgccgtgacaggaatgattgaaaccgcagcaatgactggatttgccaacaaagataagcaagaacttaagcatgctggaaagatagcaactgaagctttggagaatatacgtactatagtgtcattaacaagggaaaaagccttcgagcaaatgtatgaagagatgcttcagactcaacacagaaatacctcgaagaaagcacagattattggaagctgttatgcattcagccatgcctttatatattttgcctatgcagcagggtttcgatttggagcctatttaattcaagctggacgaatgaccccagagggcatgttcatagtttttactgcaattgcatatggagctatggccatcggaaaaacgctcgttttggctcctgaatattccaaagccaaatcgggggctgcgcatctgtttgccttgttggaaaagaaaccaaatatagacagccgcagtcaagaagggaaaaagccagacacatgtgaagggaatttagagtttcgagaagtctctttcttctatccatgtcgcccagatgttttcatcctccgtggcttatccctcagtattgagcgaggaaagacagtagcatttgtggggagcagcggctgtgggaaaagcacttctgttcaacttctgcagagactttatgaccccgtgcaaggacaagtgctgtttgatggtgtggatgcaaaagaattgaatgtacagtggctccgttcccaaatagcaatcgttcctcaagagcctgtgctcttcaactgcagcattgctgagaacatcgcctatggtgacaacagccgtgtggtgccattagatgagatcaaagaagccgcaaatgcagcaaatatccattcttttattgaaggtctccctgagaaatacaacacacaagttggactgaaaggagcacagctttctggcggccagaaacaaagactagctattgcaagggctcttctccaaaaacccaaaattttattgktggatgaggccacttcagccctcgataatgacagtgagaaggtggttcagcatgcccttgataaagccaggacgggaaggacatgcctagtggtcactcacaggctctctgcaattcagaacgcagatttgatagtggttctgcacaatggaaagataaaggaacaaggaactcatcaagagctcctgagaaatcgagacatatattttaagttagtgaatgcacagtcagtgcagtgatgctgttgaggtagcacatattttgatgttcgtgtaatgcaaagaaggagtacttaataattacttggcaagctttgaaaaaaaaaaaaaaaaaa

SEQ ID NO: 153 - DNA, 975 bp, Homo sapiens
  CDS (1)...(975)
atgaatcatatgtctgcatctctcaaaatctccaatagctccaaattccaggtctctgagttcatcctgctgggattcccgggcattcacagctggcaacactggctatctctgcccctggcactactgtatctctcagcacttgctgcaaacaccctcatcctcatcatcatctggcagaacccttctttacagcagcccatgtatattttccttggcatcctctgtatggtagacatgggtctggccactactatcatccctaagatcctggccatcttctggtttgatgccaaggttattagcctccctgagcgctttgctcagatttatgccattcacttctttgtgggcatggagtctggtatcctactctgcatggcttttgatagatatgtggctatttgtcaccctcttcgctatccatcaattgtcaccagttccttaatcttaaaagctaccctgttcatggtgctgagaaatggcttatttgtcactccagtgcctgtgcttgcagcacagcgtgattattgctccaagaatgaaattgaacactgcctgtgctctaaccttggggtcacaagcctggcttgtgatgacaggaggccaaacagcatttgccagttggttctggcatggcttggaatggggagtgatctaagtcttattatactgtcatatattttgattctgtactctgtacttagactgaactcagctgaagctgcagccaaggccctgagcacttgtagttcacatctcaccctcatccttttcttttacactattgttgtagtgatttcagtgactcatctgacagagatgaaggctactttgattccagttctacttaatgtgttgcacaacatcatccccccttccctcaaccctacagtttacgcacttcagaccaaagaacttagggcagccttccaaaaggtgctgtttgcccttacaaaagaaataagatcttag

SEQ ID NO: 154 - protein, 324 aa, Homo sapiens
MNHMSASLKISNSSKFQVSEFILLGFPGIHSWQHWLSLPLALLYLSALAANTLILIIIWQNPSLQQPMYIFLGILCMVDMGLATTIIPKILAIFWFDAKVISLPERFAQIYAIHFFVGMESGILLCMAFDRYVAICHPLRYPSIVTSSLILKATLFMVLRNGLFVTPVPVLAAQRDYCSKNEIEHCLCSNLGVTSLACDDRRPNSICQLVLAWLGMGSDLSLIILSYILILYSVLRLNSAEAAAKALSTCSSHLTLILFFYTIVVVISVTHLTEMKATLIPVLLNVLHNIIPPSLNPTVYALQTKELRAAFQKVLFALTKEIRS

SEQ ID NO: 155 - DNA, 1434 bp, Homo sapiens
taaacctctgcatcaagtcaagtaacactgagataaatatgaagaaaacaagcacatccatttaatctatataatttctaaagagatgaagaaaggcttagaaaaatactacaattttatttctgtggtggttccaacctgtgataactgagaacaatacaaatagagatttgaaattcatgttgaatcatgaatcatatgtctgcatctctcaaaatctccaatagctccaaattccaggtctctgagttcatcctgctgggattcccgggcattcacagctggcaacactggctatctctgcccctggcactactgtatctctcagcacttgctgcaaacaccctcatcctcatcatcatctggcagaacccttctttacagcagcccatgtatattttccttggcatcctctgtatggtagacatgggtctggccactactatcatccctaagatcctggccatcttctggtttgatgccaaggttattagcctccctgagcgctttgctcagatttatgccattcacttctttgtgggcatggagtctggtatcctactctgcatggcttttgatagatatgtggctatttgtcaccctcttcgctatccatcaattgtcaccagttccttaatcttaaaagctaccctgttcatggtgctgagaaatggcttatttgtcactccagtgcctgtgcttgcagcacagcgtgattattgctccaagaatgaaattgaacactgcctgtgctctaaccttggggtcacaagcctggcttgtgatgacaggaggccaaacagcatttgccagttggttctggcatggcttggaatggggagtgatctaagtcttattatactgtcatatattttgattctgtactctgtacttagactgaactcagctgaagctgcagccaaggccctgagcacttgtagttcacatctcaccctcatccttttcttttacactattgttgtagtgatttcagtgactcatctgacagagatgaaggctactttgattccagttctacttaatgtgttgcacaacatcatccccccttccctcaaccctacagtttacgcacttcagaccaaagaacttagggcagccttccaaaaggtgctgtttgcccttacaaaagaaataagatcttagagaccttctccatgatgtacatgaacctcagcttctcctaaactggatagtaaaatttcaaagaggataaatgagtaagtgaatacctttggrattccctttttatatttgtatgtaaataattgtgaaagcttcagaaaagatacaaaaaatcacagtagcctaaaatattgacaaaagctaaatatttaaatatatttgagaatatggaagaaatttctgccaaatcaaattggatttaaagaacttaatgattgatatctatctctt

SEQ ID NO: 156 - DNA, 2778 bp, Homo sapiens
  CDS (1)...(2778)
atggcattcttaattatactaattacctgctttgtgattattcttgctacttcacagccttgccagacccctgatgactttgtggctgccacttctccgggacatatcataattggaggtttgtttgctattcatgaaaaaatgttgtcctcagaagactctcccagacgaccacaaatccaggagtgtgttggctttgaaatatcagtttttcttcaaactcttgccatgatacagggcattgggatgatcaacaattcaacactcttatctggagtcaaactggggtatgaaatctatgacacttgtacagaagtcacagtggcaatggcagccactctgaggtttctttctaaattcaactgctccagagaaactgtggagtttaagtgtgactattccagctacatgccaagagttaaggctgtcagaggttctgggtactcagaaataactatggctgtctccaggatgttgaatttacagctcatgccacaggtgggttatgaatcaactgcagaaatcctgagtgacaaaattcgctttccttcatttttacggactgtgcccagtgacttccatcaaattaaagcaatggctcacctgattcagaaatctggttggaactggattggcatcataaccacagatgatgactatggacgattggctcttaacacttttataattcaggctgaagcaaataacgtgtgcatagccttcaaagaggttcttccagcctttctttcagataataccattgaagtcagaatcaatcggacactgaagaaaatcattttagaagcccaggttaatgtcattgtggtatttctgaggcaattccatgtttttgatctcttcaataaagccattgaaatgaatataaataagatgtggattgctagtgataattggtcaactgccaccaagattaccaccattcctaatgttaaaaagattggcaaagttgtagggtttgcctttagaagagggaatatatcctctttccattcctttcttcaaaatctgcacttgcttcccagtgacagtcacaaactcttacatgaatatgccatgcatttatctgcctgcgcatatgtcaaggacactgatttgagtcaatgcatattcaatcattctcaaaggactttggcctacaaggctaacaaggctatagaaaggaacttcgtcatgagaaatgacttcctctgggactatgctgagccaggactcattcatagtattcagcttgcagtgtttgcccttggttatgccattcgggatctgtgtcaagctcgtgactgtcagaaccccaacgcctttcaaccatgggagttacttggtgtgctaaaaaatgtgacattcactgatggatggaattcatttcattttgatgctcayggggatttaaatactggatatgatgttgtgctctggaaggagatcaatggacacatgactgtcactaagatggcagaatatgacctacagaatgatgtcttcatcatcccagatcaggaaacaaaaaatgagttcaggaatcttaagcaaattcaatctaaatgctccaaggaatgcagtcctgggcaaatgaagaaaactacaagaagtcaacacatctgttgctatgaatgtcagaactgtcctgaaaatcattacactaatcagacaatgcctcattgccttttatgcaacaacaaaactcactgggcccctgttaggagcactatgtgctttgaaaaggaagtggaatatctcaactggaatgactccttggccatcctactcctgattctctccccactgggaatcatatttgttctggttgttggcataatatttacaagaaacctgaacactcctgttgtgaaatcatccgggggattaagagtctgctatgtgatccttctctgtcatttcctcaattttgccagcacgagctttttcattggagaaccacaagacttcacatgtaaaaccaggcagacaatgtttggagtgagctttactctttgcatctcctgcattttgacgaagtctctgaaaattttgctagctttcagctttgatcccaaattacagaaatttctgaagtgcctctatagaccgatccttattatcttcacttgcacgggcatccaggttgtcatttgcacactctggctaatctttgcagcacctactgtagaggtgaatgtctccttgcccagagtcatcatcctggagtgtgaggagggatccatacttgcatttggcaccatgctgggctacattgccatcctggccttcatttgcttcatatttgctttcaaaggcaaatatgagaattacaatgaagccaaattcattacatttggcatgctcatttacttcatagcttggatcacattcatccctatctatgctaccacatttggcaaatatgtaccrgctgtggagattattgtcatattaatatctaactatggaatcctgtattgcacattcatccccaaatgctatgttattatttgtaagcaagagattaacacaaagtctgcctttctcaagatgatctacagttattcttcccatagtgtgagcagcattgccctgagtcctgcttcactggactccatgagcggcaatgtcacaatgaccaatcccagctctagtggcaagtctgcaacctggcagaaaagcaaagatcttcaggcacaagcatttgcacacatatgcagggaaaatgccacaagtgtatctaaaactttgcctcgaaaaagaatgtcaagtatatga

SEQ ID NO: 157 - protein, 925 aa, Homo sapiens
  VARIANT (1)...(925): Xaa = Any Amino Acid
MAFLIILITCFVIILATSQPCQTPDDFVAATSPGHIIIGGLFAIHEKMLSSEDSPRRPQIQECVGFEISVFLQTLAMIQGIGMINNSTLLSGVKLGYEIYDTCTEVTVAMAATLRFLSKFNCSRETVEFKCDYSSYMPRVKAVRGSGYSEITMAVSRMLNLQLMPQVGYESTAEILSDKIRFPSFLRTVPSDFHQIKAMAHLIQKSGWNWIGIITTDDDYGRLALNTFIIQAEANNVCIAFKEVLPAFLSDNTIEVRINRTLKKIILEAQVNVIVVFLRQFHVFDLFNKAIEMNINKMWIASDNWSTATKITTIPNVKKIGKVVGFAFRRGNISSFHSFLQNLHLLPSDSHKLLHEYAMHLSACAYVKDTDLSQCIFNHSQRTLAYKANKAIERNFVMRNDFLWDYAEPGLIHSIQLAVFALGYAIRDLCQARDCQNPNAFQPWELLGVLKNVTFTDGWNSFHFDAHGDLNTGYDVVLWKEINGHMTVTKMAEYDLQNDVFIIPDQETKNEFRNLKQIQSKCSKECSPGQMKKTTRSQHICCYECQNCPENHYTNQTMPHCLLCNNKTHWAPVRSTMCFEKEVEYLNWNDSLAILLLILSPLGIIFVLVVGIIFTRNLNTPVVKSSGGLRVCYVILLCHFLNFASTSFFIGEPQDFTCKTRQTMFGVSFTLCISCILTKSLKILLAFSFDPKLQKFLKCLYRPILIIFTCTGIQVVICTLWLIFAAPTVEVNVSLPRVIILECEEGSILAFGTMLGYIAILAFICFIFAFKGKYENYNEAKFITFGMLIYFIAWITFIPIYATTFGKYVXAVEIIVILISNYGILYCTFIPKCYVIICKQEINTKSAFLKMIYSYSSHSVSSIALSPASLDSMSGNVTMTNPSSSGKSATWQKSKDLQAQAFAHICRENATSVSKTLPRKRMSSI

SEQ ID NO: 158 - DNA, 901 bp, Homo sapiens
  CDS (1)...(900)
atggcattcttaattatactaattacctgctttgtgattattcttgctacttcacagccttgccagacccctgatgactttgtggctgccacttctccgggacatatcataattggaggtttgtttgctattcatgaaaaaatgttgtcctcagaagactctcccagacgaccacaaatccaggagtgtgttggctttgaaatatcagtttttcttcaaactcttgccatgatacagggcattgggatgatcaacaattcaacactcttatctggagtcaaactggggtatgaaatctatgacacttgtacagaagtcacagtggcaatggcagccactctgaggtttctttctaaattcaactgctccagagaaactgtggagtttaagtgtgactattccagctacatgccaagagttaaggctgtcagaggttctgggtactcagaaataactatggctgtctccaggatgttgaatttacagctcatgccacaggtgggttatgaatcaactgcagaaatcctgagtgacaaaattcgctttccttcatttttacggactgtgcccagtgacttccatcaaattaaagcaatggctcacctgattcagaaatctggttggaactggattggcatcataaccacagatgatgactatggacgattggctcttaacacttttataattcaggctgaagcaaataacgtgtgcatagccttcaaagaggttcttccagcctttctttcagataataccattgaagtcagaatcaatcggacactgaagaaaatcattttagaagcccaggttaatgtcattgtggtatttctgaggcaattccatgtttttgatctcttcaataaagccattgaaatgaatataaaaaaaaaaaaaaaaa

SEQ ID NO: 159 - protein, 300 aa, Homo sapiens
MAFLIILITCFVIILATSQPCQTPDDFVAATSPGHIIIGGLFAIHEKMLSSEDSPRRPQIQECVGFEISVFLQTLAMIQGIGMINNSTLLSGVKLGYEIYDTCTEVTVAMAATLRFLSKFNCSRETVEFKCDYSSYMPRVKAVRGSGYSEITMAVSRMLNLQLMPQVGYESTAEILSDKIRFPSFLRTVPSDFHQIKAMAHLIQKSGWNWIGIITTDDDYGRLALNTFIIQAEANNVCIAFKEVLPAFLSDNTIEVRINRTLKKIILEAQVNVIVVFLRQFHVFDLFNKAIEMNIKKKKK

SEQ ID NO: 160 - DNA, 3170 bp, Homo sapiens
ctggcactccgtgcacttaatgattcctaagaactcacatgaactgagcaaatgagatagaaacatggcattcttaattatactaattacctgctttgtgattattcttgctacttcacagccttgccagacccctgatgactttgtggctgccacttctccgggacatatcataattggaggtttgtttgctattcatgaaaaaatgttgtcctcagaagactctcccagacgaccacaaatccaggagtgtgttggctttgaaatatcagtttttcttcaaactcttgccatgatacagggcattgggatgatcaacaattcaacactcttatctggagtcaaactggggtatgaaatctatgacacttgtacagaagtcacagtggcaatggcagccactctgaggtttctttctaaattcaactgctccagagaaactgtggagtttaagtgtgactattccagctacatgccaagagttaaggctgtcagaggttctgggtactcagaaataactatggctgtctccaggatgttgaatttacagctcatgccacaggtgggttatgaatcaactgcagaaatcctgagtgacaaaattcgctttccttcatttttacggactgtgcccagtgacttccatcaaattaaagcaatggctcacctgattcagaaatctggttggaactggattggcatcataaccacagatgatgactatggacgattggctcttaacacttttataattcaggctgaagcaaataacgtgtgcatagccttcaaagaggttcttccagcctttctttcagataataccattgaagtcagaatcaatcggacactgaagaaaatcattttagaagcccaggttaatgtcattgtggtatttctgaggcaattccatgtttttgatctcttcaataaagccattgaaatgaatataaataagatgtggattgctagtgataattggtcaactgccaccaagattaccaccattcctaatgttaaaaagattggcaaagttgtagggtttgcctttagaagagggaatatatcctctttccattcctttcttcaaaatctgcacttgcttcccagtgacagtcacaaactcttacatgaatatgccatgcatttatctgcctgcgcatatgtcaaggacactgatttgagtcaatgcatattcaatcattctcaaaggactttggcctacaaggctaacaaggctatagaaaggaacttcgtcatgagaaatgacttcctctgggactatgctgagccaggactcattcatagtattcagcttgcagtgtttgcccttggttatgccattcgggatctgtgtcaagctcgtgactgtcagaaccccaacgcctttcaaccatgggagttacttggtgtgctaaaaaatgtgacattcactgatggatggaattcatttcattttgatgctcayggggatttaaatactggatatgatgttgtgctctggaaggagatcaatggacacatgactgtcactaagatggcagaatatgacctacagaatgatgtcttcatcatcccagatcaggaaacaaaaaatgagttcaggaatcttaagcaaattcaatctaaatgctccaaggaatgcagtcctgggcaaatgaagaaaactacaagaagtcaacacatctgttgctatgaatgtcagaactgtcctgaaaatcattacactaatcagacaatgcctcattgccttttatgcaacaacaaaactcactgggcccctgttaggagcactatgtgctttgaaaaggaagtggaatatctcaactggaatgactccttggccatcctactcctgattctctccccactgggaatcatatttgttctggttgttggcataatatttacaagaaacctgaacactcctgttgtgaaatcatccgggggattaagagtctgctatgtgatccttctctgtcatttcctcaattttgccagcacgagctttttcattggagaaccacaagacttcacatgtaaaaccaggcagacaatgtttggagtgagctttactctttgcatctcctgcattttgacgaagtctctgaaaattttgctagctttcagctttgatcccaaattacagaaatttctgaagtgcctctatagaccgatccttattatcttcacttgcacgggcatccaggttgtcatttgcacactctggctaatctttgcagcacctactgtagaggtgaatgtctccttgcccagagtcatcatcctggagtgtgaggagggatccatacttgcatttggcaccatgctgggctacattgccatcctggccttcatttgcttcatatttgctttcaaaggcaaatatgagaattacaatgaagccaaattcattacatttggcatgctcatttacttcatagcttggatcacattcatccctatctatgctaccacatttggcaaatatgtaccrgctgtggagattattgtcatattaatatctaactatggaatcctgtattgcacattcatccccaaatgctatgttattatttgtaagcaagagattaacacaaagtctgcctttctcaagatgatctacagttattcttcccatagtgtgagcagcattgccctgagtcctgcttcactggactccatgagcggcaatgtcacaatgaccaatcccagctctagtggcaagtctgcaacctggcagaaaagcaaagatcttcaggcacaagcatttgcacacatatgcagggaaaatgccacaagtgtatctaaaactttgcctcgaaaaagaatgtcaagtatatgaataagccttaggagatgccacattccagaataaaatgtttccagggtctttgcatctaagatataaatttactttcccagcaaatatgtcatatatatttccttgccaccatctttaccaagttttagttgaacagtcactctgttcaatcacctatttaacaaatagaattgagccttcagcctgaagctccctttatttcctacctttttcattggtctccatctttacctgcttcctcttaggcacatcgttaaagacttctcttctaatcaaagttgtcccgtaatgtgtcatccttactccattcccgacaccctcttctcaa

SEQ ID NO: 161 - DNA, 1017 bp, Homo sapiens
  CDS (1)...(1017)
atgaaaagtcaaattgaaaaaagtgacttaaaatatagagccattttattgcaaaaagtcacaaggatgttcctgcttttctgggtccttctcttggtcctttctagacttttggtagtcatgggtcgaggaaacagcactgaagtgactgaattccatcttctgggatttggtgtccaacacgaatttcagcatgtccttttcattgtacttcttcttatctatgtgacctccctgataggaaatattggaatgatcttactcatcaagaccgattccagacttcaaacacccatgtacttttttccacaacatttggcttttgttgatatctgttatacttctgctatcactcccaagatgctccaaagcttcacagaagaaaataatttgataacatttcggggctgtgtgatacaattcttagtttatgcaacatttgcaaccagtgactgttacctcctagctattatggcaatggattgttatgttgccatctgtaagccccttcgctatcccatgatcatgtcccaaacagtctacatccaactcgtagctggctcatatattataggctcaataaatgcctctgtacatacaggttttacattttcactgtccttctgcaagtctaataaaatcaatcactttttctgtgatggtctcccaattcttgccctttcatgctccaacattgacatcaacatcattctagatgttgtctttgtgggatttgacttgatgttcactgagttggtcatcatcttttcctacatctacattatggtcaccatcctgaagatgtcttctactgctgggaggaaaaaatccttctccacatgtgcctcccacctgacagcagtaaccattttctatgggacactctcttacatgtacttacagcctcagtctaataattctcaggagaatatgaaagtagcctctatattttatggcactgttattcccatgttgaatcctttaatctatagcttgagaaataaggaaggaaaataa

SEQ ID NO: 162 - protein, 338 aa, Homo sapiens
MKSQIEKSDLKYRAILLQKVTRMFLLFWVLLLVLSRLLVVMGRGNSTEVTEFHLLGFGVQHEFQHVLFIVLLLIYVTSLIGNIGMILLIKTDSRLQTPMYFFPQHLAFVDICYTSAITPKMLQSFTEENNLITFRGCVIQFLVYATFATSDCYLLAIMAMDCYVAICKPLRYPMIMSQTVYIQLVAGSYIIGSINASVHTGFTFSLSFCKSNKINHFFCDGLPILALSCSNIDINIILDVVFVGFDLMFTELVIIFSYIYIMVTILKMSSTAGRKKSFSTCASHLTAVTIFYGTLSYMYLQPQSNNSQENMKVASIFYGTVIPMLNPLIYSLRNKEGK

SEQ ID NO: 163 - DNA, 897 bp, Homo sapiens
  CDS (1)...(897)
atgggtcgaggaaacagcactgaagtgactgaattccatcttctgggatttggtgtccaacacgaatttcagcatgtccttttcattgtacttcttcttatctatgtgacctccctgataggaaatattggaatgatcttactcatcaagaccgattccagacttcaaacacccatgtacttttttccacaacatttggcttttgttgatatctgttatacttctgctatcactcccaagatgctccaaagcttcacagaagaaaataatttgataacatttcggggctgtgtgatacaattcttagtttatgcaacatttgcaaccagtgactgttacctcctagctattatggcaatggattgttatgttgccatctgtaagccccttcgctatcccatgatcatgtcccaaacagtctacatccaactcgtagctggctcatatattataggctcaataaatgcctctgtacatacaggttttacattttcactgtccttctgcaagtctaataaaatcaatcactttttctgtgatggtctcccaattcttgccctttcatgctccaacattgacatcaacatcattctagatgttgtctttgtgggatttgacttgatgttcactgagttggtcatcatcttttcctacatctacattatggtcaccatcctgaagatgtcttctactgctgggaggaaaaaatccttctccacatgtgcctcccacctgacagcagtaaccattttctatgggacactctcttacatgtacttacagcctcagtctaataattctcaggagaatatgaaagtagcctctatattttatggcactgttattcccatgttgaatcctttaatctatagcttgagaaataaggaaggaaaataa

SEQ ID NO: 164 - protein, 298 aa, Homo sapiens
MGRGNSTEVTEFHLLGFGVQHEFQHVLFIVLLLIYVTSLIGNIGMILLIKTDSRLQTPMYFFPQHLAFVDICYTSAITPKMLQSFTEENNLITFRGCVIQFLVYATFATSDCYLLAIMAMDCYVAICKPLRYPMIMSQTVYIQLVAGSYIIGSINASVHTGFTFSLSFCKSNKINHFFCDGLPILALSCSNIDINIILDVVFVGFDLMFTELVIIFSYIYIMVTILKMSSTAGRKKSFSTCASHLTAVTIFYGTLSYMYLQPQSNNSQENMKVASIFYGTVIPMLNPLIYSLRNKEGK

SEQ ID NO: 165 - DNA, 951 bp, Homo sapiens
  CDS (1)...(951)
atgttcctgcttttctgggtccttctcttggtcctttctagacttttggtagtcatgggtcgaggaaacagcactgaagtgactgaattccatcttctgggatttggtgtccaacacgaatttcagcatgtccttttcattgtacttcttcttatctatgtgacctccctgataggaaatattggaatgatcttactcatcaagaccgattccagacttcaaacacccatgtacttttttccacaacatttggcttttgttgatatctgttatacttctgctatcactcccaagatgctccaaagcttcacagaagaaaataatttgataacatttcggggctgtgtgatacaattcttagtttatgcaacatttgcaaccagtgactgttacctcctagctattatggcaatggattgttatgttgccatctgtaagccccttcgctatcccatgatcatgtcccaaacagtctacatccaactcgtagctggctcatatattataggctcaataaatgcctctgtacatacaggttttacattttcactgtccttctgcaagtctaataaaatcaatcactttttctgtgatggtctcccaattcttgccctttcatgctccaacattgacatcaacatcattctagatgttgtctttgtgggatttgacttgatgttcactgagttggtcatcatcttttcctacatctacattatggtcaccatcctgaagatgtcttctactgctgggaggaaaaaatccttctccacatgtgcctcccacctgacagcagtaaccattttctatgggacactctcttacatgtacttacagcctcagtctaataattctcaggagaatatgaaagtagcctctatattttatggcactgttattcccatgttgaatcctttaatctatagcttgagaaataaggaaggaaaataa

SEQ ID NO: 166 - protein, 316 aa, Homo sapiens
MFLLFWVLLLVLSRLLVVMGRGNSTEVTEFHLLGFGVQHEFQHVLFIVLLLIYVTSLIGNIGMILLIKTDSRLQTPMYFFPQHLAFVDICYTSAITPKMLQSFTEENNLITFRGCVIQFLVYATFATSDCYLLAIMAMDCYVAICKPLRYPMIMSQTVYIQLVAGSYIIGSINASVHTGFTFSLSFCKSNKINHFFCDGLPILALSCSNIDINIILDVVFVGFDLMFTELVIIFSYIYIMVTILKMSSTAGRKKSFSTCASHLTAVTIFYGTLSYMYLQPQSNNSQENMKVASIFYGTVIPMLNPLIYSLRNKEGK

SEQ ID NO: 167 - DNA, 2600 bp, Homo sapiens
aattatttcttgtttcttgttcctccactacataatttctgtaataagcaatagaaaatgtaaggccatttctcagacatccattatataacagggttaatatacttgtaaagaatagcacctagatggaagttgcattttaagaatactagtacaaagacactttgaagccttcaaaaatatgtgaatatgaacatattttgggaaattgctctccaattaattctactaatttcaagaactagaaagagaaataaaataagtggctgtgaataattatgtttctaaaaaggtacagaattacattttaacgttatttagaataaatacaaatacctgtttaatatagtgaaaaaatgcttctctatgtttctaagaaccacgcacattagaagtcagtcttcttctaagaaaatcttcttcattttgaagataaatctgtttcatctttcatctagtaactctctctttacttgatgattataaattttttttaatttggaaataacactattgtgagtatttgtcatgaaaagtcaaattgaaaaaagtgacttaaaatatagagccattttattgcaaaaagtcacaaggatgttcctgcttttctgggtccttctcttggtcctttctagacttttggtagtcatgggtcgaggaaacagcactgaagtgactgaattccatcttctgggatttggtgtccaacacgaatttcagcatgtccttttcattgtacttcttcttatctatgtgacctccctgataggaaatattggaatgatcttactcatcaagaccgattccagacttcaaacacccatgtacttttttccacaacatttggcttttgttgatatctgttatacttctgctatcactcccaagatgctccaaagcttcacagaagaaaataatttgataacatttcggggctgtgtgatacaattcttagtttatgcaacatttgcaaccagtgactgttacctcctagctattatggcaatggattgttatgttgccatctgtaagccccttcgctatcccatgatcatgtcccaaacagtctacatccaactcgtagctggctcatatattataggctcaataaatgcctctgtacatacaggttttacattttcactgtccttctgcaagtctaataaaatcaatcactttttctgtgatggtctcccaattcttgccctttcatgctccaacattgacatcaacatcattctagatgttgtctttgtgggatttgacttgatgttcactgagttggtcatcatcttttcctacatctacattatggtcaccatcctgaagatgtcttctactgctgggaggaaaaaatccttctccacatgtgcctcccacctgacagcagtaaccattttctatgggacactctcttacatgtacttacagcctcagtctaataattctcaggagaatatgaaagtagcctctatattttatggcactgttattcccatgttgaatcctttaatctatagcttgagaaataaggaaggaaaataagctttaaaagtgataggaaaaaagttttgttaagttagacacagttgttaaaattcaacacaacaaagcatccagcacagctaatctgccaaaatttaaagtttctaaaatagggagcatgtaggaaaatctcaaattaaccatctaacatcacacctagagcaattagaaaaaagaaataactaaaatcagaacaaaactgaacaaaattgagacccaaaagtccatacaaagaatcaatgaaaccaaaacttgttttttattttgaaataatcaataagattggtaggcttctatctagattcacaaagaaaaaaaaaggaaagatccaaataagcacaagcagaaaggacaaaggtgacattataaacaatcccacagaaatacaaaagatcctcagagactattatgaacatcatttctatgcaaataaactagaaaatctagaggaaatagataaattcccaggaacacacaacctctcaagatttaatcaggaagaaattgaaaccttgaatgaaccaatatcaagttctgaagtggaagctaagtgccatccaaaaaggggcccagacaagacaaatttgcagtcaaattctactagatgtaaaaagaagagctaataccaatgctattgaaactatttcaaaatattgaagaggaggaactcttttgtaacccattctacaaagccacaattaccctgataccaaaacttagcaacgacaaaacaaaacaaaaaataaaactgcaggcaaatatccctgatgaacatagatgcaaagccaacagtgaaatactagcaaatcgaattgaacagcacatcaaaagttaattcaccatgatcaagtaggcttcattcttgggatgcaagtttggctcaaaatatgcaaattattaaatctgattcaccacatcaatagtatttaaaacaaaaaccatatgatcatctcaatagatgcaggaaaattcttcaataaactcctacatccctttataataaaaaccctcaaaaaactaggcatcaaagcaacgtatctcaaaataagtgccat

SEQ ID NO: 168 - DNA, 924 bp, Homo sapiens
  CDS (1)...(924)
atgaatcacagcgttgtaactgagttcattattctgggcctcaccaaaaagcctgaactccagggaattatcttcctcttttttctcattgtctatcttgtggcttttctcggcaacatgctcatcatcattgccaaaatctatagcaacaccttgcatacgcccatgtatgttttccttctgacactggctgttgtggacatcatctgcacaacaagcatcataccgaagatgctggggaccatgctaacatcagaaaataccatttcatatgcaggctgcatgtcccagctcttcttgttcacatggtctctgggagctgagatggttctcttcaccaccatggcctatgaccgctatgtggccatttgtttccctcttcattacagtactattatgaaccaccatatgtgtgtagccttgctcagcatggtcatggctattgcagtcaccaattcctgggtgcacacagctcttatcatgaggttgactttctgtgggccaaacaccattgaccacttcttctgtgagatacccccattgctggctttgtcctgtagccctgtaagaatcaatgaggtgatggtgtatgttgctgatattaccctggccataggggactttattcttacctgcatctcctatggttttatcattgttgctattctccgtatccgcacagtagaaggcaagaggaaggccttctcaacatgctcatctcatctcacagtggtgaccctttactattctcctgtaatctacacctatatccgccctgcttccagctatacatttgaaagagacaaggtggtagctgcactctatactcttgtgactcccacattaaacccgatggtgtacagcttccagaatagggagatgcaggcaggaattaggaaggtgtttgcatttctgaaacactag

SEQ ID NO: 169 - protein, 307 aa, Homo sapiens
MNHSVVTEFIILGLTKKPELQGIIFLFFLIVYLVAFLGNMLIIIAKIYSNTLHTPMYVFLLTLAVVDIICTTSIIPKMLGTMLTSENTISYAGCMSQLFLFTWSLGAEMVLFTTMAYDRYVAICFPLHYSTIMNHHMCVALLSMVMAIAVTNSWVHTALIMRLTFCGPNTIDHFFCEIPPLLALSCSPVRINEVMVYVADITLAIGDFILTCISYGFIIVAILRIRTVEGKRKAFSTCSSHLTVVTLYYSPVIYTYIRPASSYTFERDKVVAALYTLVTPTLNPMVYSFQNREMQAGIRKVFAFLKH

SEQ ID NO: 170 - DNA, 2000 bp, Homo sapiens
atttttcatctgaaatatcctcactataattagccctgtcagcttgtattatttcaagtatctttgctcgtgtatatctcaaggacacctaaatgtaccatgcaattaactaaattattgaggtatgtaataatttgtattacagctccattggatatatatgcatatccagaatatatacatatgtgtgtgtatatatatatatatgtgtgtgtgtatttagacaagttttaagtgaaaatgatatcaaaatatttgaaggcattttgaaaatatttttcttctcaaccactggcttcagtttgagtcatcaatggaggaacatacatcagagaatgggattagtctggaaaacagagtatattgcctggaatacagaactccatcaaatgggaattcctgctgcaaagttgtgtccaatcaagaattaagtccctaagtacacacactcctcatgttatctcctaacaacacagggattctttccattttcagttgtttattctgtgcaattactgccattcaatcacccaagcaggatgaatcacagcgttgtaactgagttcattattctgggcctcaccaaaaagcctgaactccagggaattatcttcctcttttttctcattgtctatcttgtggcttttctcggcaacatgctcatcatcattgccaaaatctatagcaacaccttgcatacgcccatgtatgttttccttctgacactggctgttgtggacatcatctgcacaacaagcatcataccgaagatgctggggaccatgctaacatcagaaaataccatttcatatgcaggctgcatgtcccagctcttcttgttcacatggtctctgggagctgagatggttctcttcaccaccatggcctatgaccgctatgtggccatttgtttccctcttcattacagtactattatgaaccaccatatgtgtgtagccttgctcagcatggtcatggctattgcagtcaccaattcctgggtgcacacagctcttatcatgaggttgactttctgtgggccaaacaccattgaccacttcttctgtgagatacccccattgctggctttgtcctgtagccctgtaagaatcaatgaggtgatggtgtatgttgctgatattaccctggccataggggactttattcttacctgcatctcctatggttttatcattgttgctattctccgtatccgcacagtagaaggcaagaggaaggccttctcaacatgctcatctcatctcacagtggtgaccctttactattctcctgtaatctacacctatatccgccctgcttccagctatacatttgaaagagacaaggtggtagctgcactctatactcttgtgactcccacattaaacccgatggtgtacagcttccagaatagggagatgcaggcaggaattaggaaggtgtttgcatttctgaaacactagtagtttcaacatgcaacatcacttctgtactccagaaccatcttctagagcatctcagattttactggtttttcatacttacctccactccaattttcccttccctcttattcctgccttcttcctagcagtctcattgtctccaaaattctgtactctttatgtgaagaatattcataaagcaatatgcacaataccctcacataaatatatgtcataatatatattccaacattttccaaaaatatgtacataacttcgaatacttatatatgcatatacacaaatatttacctatatgtgcatgtgcacatcatacatgcaaatatcacaaaacattttgtgtattttgtgccatttatttgttggtatgtgaatgtgagctggagagaagtagtgtgtgtgataaattttcccttgcttaataggctgggttcattcacttacagcattgtgataatgaggtatctactctggggttgaacctcattacgttatttagatttcattggagaaaaatcgtgctctactgaataa

SEQ ID NO: 171 - DNA, 882 bp, Homo sapiens
  CDS (1)...(882)
atgggattttcgaattcctgggatattcagattgtacatgctgctctattcttcctagtttacctggcagctgtcataggaaatctcctaatcatcatacttaccactctggatgttcacctccaaaccccaatgtatttctttttgagaaacttgtctttcttagatttttgttacatctctgtcacaattccaaaatctattgttagttccttgactcatgatacttccatttctttctttgggtgtgctctgcaagccttctttttcatggacttggcaactacggaggtagccatccttacagtgatgtcctatgaccgctatatggccatctgccggcctttacattatgaggtcatcataaaccaaggtgtctgtctgaggatgatggccatgtcgtggctcagtggggtgatctgtggattcatgcatgtgatagcaacattctcattaccattctgtgggcgcaatagaatacgtcaatttttctgtaatattccacagctcctaagcctcttagaccccaaagtaattaccattgagattggagtcatggtttttggtacaagtcttgtgataatctcctttgttgtaattactctctcctacatgtacattttttctgtcatcatgaggattccttctaaggagggtagatcaaaaacattttctacctgcattccacatcttgtggttgtaacactctttatgatatctggcagcattgcctatgtgaagccaatttcaaattctccccccgttctggatgttttcctgtctgcgttctacacagtcgtgcccccgaccctgaaccccgtcatctatagtctgaggaatagggacatgaaggcagccctgagaaggcagtgtggtccctga

SEQ ID NO: 172 - protein, 293 aa, Homo sapiens
MGFSNSWDIQIVHAALFFLVYLAAVIGNLLIIILTTLDVHLQTPMYFFLRNLSFLDFCYISVTIPKSIVSSLTHDTSISFFGCALQAFFFMDLATTEVAILTVMSYDRYMAICRPLHYEVIINQGVCLRMMAMSWLSGVICGFMHVIATFSLPFCGRNRIRQFFCNIPQLLSLLDPKVITIEIGVMVFGTSLVIISFVVITLSYMYIFSVIMRIPSKEGRSKTFSTCIPHLVVVTLFMISGSIAYVKPISNSPPVLDVFLSAFYTVVPPTLNPVIYSLRNRDMKAALRRQCGP

SEQ ID NO: 173 - DNA, 1200 bp, Homo sapiens
attctgtgtaattgagatttagggttagaacgatagtatccatgctgcatatgagtaaccttataattaattatcacaaattgaaatatcactgggggtagccatatttgatatttctataatccattttttttctctctttaggaagaaatggaacgaccacaagtgattttaaccaaactgaagttgctgaatttttcctcatgggattttcgaattcctgggatattcagattgtacatgctgctctattcttcctagtttacctggcagctgtcataggaaatctcctaatcatcatacttaccactctggatgttcacctccaaaccccaatgtatttctttttgagaaacttgtctttcttagatttttgttacatctctgtcacaattccaaaatctattgttagttccttgactcatgatacttccatttctttctttgggtgtgctctgcaagccttctttttcatggacttggcaactacggaggtagccatccttacagtgatgtcctatgaccgctatatggccatctgccggcctttacattatgaggtcatcataaaccaaggtgtctgtctgaggatgatggccatgtcgtggctcagtggggtgatctgtggattcatgcatgtgatagcaacattctcattaccattctgtgggcgcaatagaatacgtcaatttttctgtaatattccacagctcctaagcctcttagaccccaaagtaattaccattgagattggagtcatggtttttggtacaagtcttgtgataatctcctttgttgtaattactctctcctacatgtacattttttctgtcatcatgaggattccttctaaggagggtagatcaaaaacattttctacctgcattccacatcttgtggttgtaacactctttatgatatctggcagcattgcctatgtgaagccaatttcaaattctccccccgttctggatgttttcctgtctgcgttctacacagtcgtgcccccgaccctgaaccccgtcatctatagtctgaggaatagggacatgaaggcagccctgagaaggcagtgtggtccctgagaaggcagtgtggtatgctagatgaagaatttgattacggaccagactcttgaactcttgctctaatcaggcaatttgtaaactctctgggtttatattttcaattgattgctga

SEQ ID NO: 174 - DNA, 1074 bp, Homo sapiens
  CDS (1)...(1074)
atgaataacactattgtatttgtcataaaaatacaaatagaaaaaagtgacttgaaatatagagccatttcattgcaagaaatctcaaagatttcccttcttttctgggtccttctcttggtcatttctagacttttactagccatgacactaggaaacagcactgaagtcactgaattctatcttctgggatttggtgcccagcatgagttttggtgtatcctcttcattgtattccttctcatctatgtgacctccataatgggtaatagtggaataatcttactcatcaacacagattccagatttcaaacactcacgtacttttttctacaacatttggcttttgttgatatctgttacacttctgctatcactcccaagatgctccaaagcttcacagaagaaaagaatttgatattatttcagggctgtgtgatacaattcttagtttatgcaacatttgcaaccagtgactgttatctcctggctatgatggcagtggatccttatgttgccatctgtaagccccttcactatactgtaatcatgtcccgaacagtctgcatccgtttggtagctggttcatacatcatgggctcaataaatgcctctgtacaaacaggttttacatgttcactgtccttctgcaagtccaatagcatcaatcactttttctgtgatgttccccctattcttgctctttcatgctccaatgttgacatcaacatcatgctacttgttgtctttgtgggatctaacttgatattcactgggttggtcgtcatcttttcctacatctacatcatggccaccatcctgaaaatgtcttctagtgcaggaaggaaaaaatccttctcaacatgtgcttcccacctgaccgcagtcaccattttctatgggacactctcttacatgtatttgcagtctcattctaataattcccaggaaaatatgaaagtggcctttatattttatggcacagttattcccatgttaaatcctttaatctatagcttgagaaataaggaagtaaaagaagctttaaaagtgatagggaaaaagttattttaa

SEQ ID NO: 175 - protein, 357 aa, Homo sapiens [sequence omitted]

SEQ ID NO: 176 - DNA, 930 bp, Homo sapiens
  CDS (1)...(930)
atgacactaggaaacagcactgaagtcactgaattctatcttctgggatttggtgcccagcatgagttttggtgtatcctcttcattgtattccttctcatctatgtgacctccataatgggtaatagtggaataatcttactcatcaacacagattccagatttcaaacactcacgtacttttttctacaacatttggcttttgttgatatctgttacacttctgctatcactcccaagatgctccaaagcttcacagaagaaaagaatttgatattatttcagggctgtgtgatacaattcttagtttatgcaacatttgcaaccagtgactgttatctcctggctatgatggcagtggatccttatgttgccatctgtaagccccttcactatactgtaatcatgtcccgaacagtctgcatccgtttggtagctggttcatacatcatgggctcaataaatgcctctgtacaaacaggttttacatgttcactgtccttctgcaagtccaatagcatcaatcactttttctgtgatgttccccctattcttgctctttcatgctccaatgttgacatcaacatcatgctacttgttgtctttgtgggatctaacttgatattcactgggttggtcgtcatcttttcctacatctacatcatggccaccatcctgaaaatgtcttctagtgcaggaaggaaaaaatccttctcaacatgtgcttcccacctgaccgcagtcaccattttctatgggacactctcttacatgtatttgcagtctcattctaataattcccaggaaaatatgaaagtggcctttatattttatggcacagttattcccatgttaaatcctttaatctatagcttgagaaataaggaagtaaaagaagctttaaaagtgatagggaaaaagttattttaa

SEQ ID NO: 177 - protein, 309 aa, Homo sapiens [sequence omitted]

SEQ ID NO: 178 - DNA, 2600 bp, Homo sapiens
attctaccttcttctaataaaggtttatcccaataaaaggaacactccttgaaagaactgtatttctttcattttacagtaaatttaccctaggaagaaacttatacgaacttactatacttcagtccttgttagatgttaaaatgaagagaattgtttcttgttcctcaactacagaattgaaaaaaaaaagtaatagaaaatgtaaggctatttctcaggcatccattacataatgaggttattttgcttgtaaagaatatcacatagatgagagatgcagtctagggatactaatacaaagacacgttgaagccttcaaacatatgtgaaccatgaacacatttcaaaaaaattctctctaattctattaatttccaaagctggaaccaaaattaaaatggtaagtggctgtgaacaattataagtttctaaaaaagtaaaaaattacattttagcattactttaaaaatatggatagctgtttaatacagaggaaaattgtcaatctatgtttctaagaactatacacattaggagttaggatacttctaagacaatctccttcgattttgaagatgaatccatttcatcttacatcaagtaaatcactctttacttgatgattataaatacatttcttaaatttgaaaatgaataacactattgtatttgtcataaaaatacaaatagaaaaaagtgacttgaaatatagagccatttcattgcaagaaatctcaaagatttcccttcttttctgggtccttctcttggtcatttctagacttttactagccatgacactaggaaacagcactgaagtcactgaattctatcttctgggatttggtgcccagcatgagttttggtgtatcctcttcattgtattccttctcatctatgtgacctccataatgggtaatagtggaataatcttactcatcaacacagattccagatttcaaacactcacgtacttttttctacaacatttggcttttgttgatatctgttacacttctgctatcactcccaagatgctccaaagcttcacagaagaaaagaatttgatattatttcagggctgtgtgatacaattcttagtttatgcaacatttgcaaccagtgactgttatctcctggctatgatggcagtggatccttatgttgccatctgtaagccccttcactatactgtaatcatgtcccgaacagtctgcatccgtttggtagctggttcatacatcatgggctcaataaatgcctctgtacaaacaggttttacatgttcactgtccttctgcaagtccaatagcatcaatcactttttctgtgatgttccccctattcttgctctttcatgctccaatgttgacatcaacatcatgctacttgttgtctttgtgggatctaacttgatattcactgggttggtcgtcatcttttcctacatctacatcatggccaccatcctgaaaatgtcttctagtgcaggaaggaaaaaatccttctcaacatgtgcttcccacctgaccgcagtcaccattttctatgggacactctcttacatgtatttgcagtctcattctaataattcccaggaaaatatgaaagtggcctttatattttatggcacagttattcccatgttaaatcctttaatctatagcttgagaaataaggaagtaaaagaagctttaaaagtgatagggaaaaagttattttaaatcagccccagttgttaacattcaactcaacaaatcatccaacatagctgttctgctaaaatttaatttttccacaataaggaatatgtagaaagatgtcaaattaataatctaacatcacctctagaggaatttaaaatacaaaagccaacaaatcccaaacctagcagaagaaaaaaataactaaaatcagaacagaactgaacaaaattgagacccaaaatttatgcaaaaatttaatgaaaccaaaatttggtttcttggaagaataaataagattggtaggctgctagccagattcacaaagagaaaagagggaatatctaaataagcacaaccagaaagaacaaaggtgacattacaaccaatcccacagaaatacaaaaaaatactcagagactattatgaacacttccatgcaaataagctagaaaatatagagaaaaatggatgaattcctgggaacatacagcctctcaggattttatcagaaagacactgaaaccctgagccaatcaataccaagttttgaaattgaatctctactaaaaaaaacctaccaaccaaaaaaaaaaatcccagaccaaaagaatttgctgtcaaattctatcagatgtaaaaagaagagctggggccaattctagtgaaactatttggaaaaattgaggaacagggactcttctgtaactcattctatgaaactagtatcagcctgatacaaaaacctgacaaagacacaatgaaaaaagaaaactgcaagccagtattcctgataaacatagatgcaaaaccatcaatgaaatactagcaaaccaaattcaacagcacatcaaaagttaattcaccatgatcaagtaggcttcattcttggat

SEQ ID NO: 179 - DNA, 933 bp, Homo sapiens
  CDS (1)...(933)
atggaaagcaatcagacctggatcacagaagtcatcctgttgggattccaggtggacccagctctggagttgttcctctttgggtttttcttgctattctacagcttaaccctgatgggaaatgggattatcctggggctcatctacttggactctagactgcacacacccatgtatgtcttcctgtcacacctggccattgtggacatgtcctatgcctcgagtactgtccctaagatgctagcaaatcttgtgatgcacaaaaaagtcatctcctttgctccttgcatacttcagacttttttgtatttggcgtttgctattacagagtgtctgattttggtgatgatgtgctatgatcggtatgtggcaatctgtcaccccttgcaatacaccctcattatgaactggagagtgtgcactgtcctggcytcaacttgctggatatttagctttctcttggctctggtccatattactcttattctgaggctgcctttttgtggcccacaaaagatcaaccactttttctgtcaaatcatgtccgtattcaaattggcctgtgctgacactaggctcaaccaggtggtcctatttgcgggttctgcgttcatcttagtggggccgctctgcctggtgctggtctcctacttgcacatcctggtggccatcttgaggatccagtctggggagggccgcagaaaggccttctctacctgctcctcccacctctgcgtggtggggcttttctttggcagcgccattgtcatgtacatggcccccaagtcaagccattctcaagaacggaggaagatcctttccctgttttacagccttttcaacccgatcctgaaccccctcatctacagccttaggaatgcagaggtgaaaggggctctaaagagagtcctttggaaacagagatcaatgtga

SEQ ID NO: 180 - protein, 310 aa, Homo sapiens
  VARIANT (1)...(310): Xaa = Any Amino Acid
MESNQTWITEVILLGFQVDPALELFLFGFFLLFYSLTLMGNGIILGLIYLDSRLHTPMYVFLSHLAIVDMSYASSTVPKMLANLVMHKKVISFAPCILQTFLYLAFAITECLILVMMCYDRYVAICHPLQYTLIMNWRVCTVLXSTCWIFSFLLALVHITLILRLPFCGPQKINHFFCQIMSVFKLACADTRLNQVVLFAGSAFILVGPLCLVLVSYLHILVAILRIQSGEGRRKAFSTCSSHLCVVGLFFGSAIVMYMAPKSSHSQERRKILSLFYSLFNPILNPLIYSLRNAEVKGALKRVLWKQRSM

SEQ ID NO: 181 - DNA, 3633 bp, Homo sapiens
  CDS (1)...(3633)
atgacatctagtaatacccaacctctgcttatgacttcctggaacatacccacagctgaaggttctcagtttccaatttccaccactattaatgtacctacatccaatgagatggaaacagagactctacaccttgttcctgggcctttgtcaacattcacagcctctcagactggtctagtatctaaagatgtcatggcaatgtcatcaattcctatgtcaggaattcttcctaaccatgggctttctgagaacccttcattatcaacatctttaagagctatcacttccacattggctgacgttaagcacacatttgagaaaatgaccacatctgtaactcctgggaccacactcccatcaattctttctggtgccacttcaggatctgtaatttcaaagtcacccattctgacatggctcttatctagtctcccttctggctcccctccggcaactgtatctaatgcccctcatgttatgacttcctctacagtagaggtgtcaaaatcaacatttctgacatctgacatgatatcagcgcacccattcactaacttgacaacactaccctctgctactatgagcaccatactcacccgaaccattcctacacctacactgggtggtatcactactggcttcccaacttctctccctatgtctataaatgtcacagatgacattgtgtacatttccacacaccctgaggcatcctccagaaccacaataactgccaaccccaggactgtgtctcatccttcatccttcagcagaaagactatgtcaccttctacaactgaccacactctatctgttggtgccatgcctctgcctagctctacaataacatcttcatggaacagaattccaactgcatcatcaccctctactttaattattcctaagcccacactggactcccttctaaatataatgactactacatccactgttcctggagcctcatttccactcatatccactggggtgacatatccttttacagcaactgtgtcttcaccaatatcgtccttttttgaaacaacttggctggactccacaccttcctttctatctacggaagcatcgacttcgcctactgccaccaagtccacagtttccttctacaatgttgaaatgagcttctctgtctttgttgaagagccaaggatccctattaccagtgttataaatgaatttacggaaaattcgttgaattctatatttcagaacagtgaattttctcttgctactctggaaacccaaattaaaagcagggacatttcagaggaagagatggtcatggatcgagctattttggaacagagagaaggacaagaaatggctacaatttcctatgtaccatacagttgtgtttgtcaggtcatcataaaagccagctcttccttagcatcctctgaattgatgagaaaaatcaaaagtaaaatacatggcaacttcacacatggaaacttcacacaagatcaattgacgttattagtaaactgtgaacacgttgcagtgaaaaaactagagcctggaaattgcaaagctgatgaaacagcctctaaatacaaagggacctataagtggctattaaccaaccctacggagacagcccaaaccagatgcataaaaaatgaggatggaaatgccacaagattctgttcaatcagcatcaacacgggcaaatctcagtgggaaaagccaaagtttaaacaatgcaaattgcttcaagaacttcctgacaagattgtggatcttgctaatattaccataagtgatgagaatcctgaggatgttgcagagcatattttaaatttgataaatgaatccccagccctgggtaaagaagagacaaagattattgtttctaaaatatcagatatttcacaatgtgatgagataagtatgaacctaactcatgttatgttacaaataatcaacgttgttttggaaaagcaaaacaattccgcctctgatctgcatgaaataagcaatgaaattctgaggataattgagcgtcctggtcacaagatggagttttctgggcagatagcaaatctggcggtggccgggctggctttggctgtgctgcggggggaccacacgtttgatggcatggctttcagcattcactcctatgaagaaggcccagaccctgacattttcctaggcaatgtccctgtgggagggattttggcttccatatatttgcctaaatcactgacggagagaattcctcttagcaacttacaaccgatcttgtttaatttctttggccaaacttcactctttaagaccaaaaatgtcactaaagcattaaccacatatgttgtgagtgccagcatttcagatatgttcattcaaaacttagctgacccagtggttatcactctgcagcatattggaggaaaccagaattatggtcaagttcactgtgccttttgggattttgagaataataatgggctgggtggatggaattcgtcaggctgtaaagtaaaggaaacaaatgtaaattacacaatctgtcagtgtgaccacctcacccattttggagtcttaatggatttatccaggtctacagtggattcagtgaatgaacagatattagcgcttataacatacaccggatgtggaatctcctccattttcctgggagttgcagtggtgacatacatagcttttcacaaacttcgaaaagattatcctgccaaaattctgatcaacctgtgcacagcactactgatgctaaacctggtatttttgatcaattcttggttgtcatcatttcagaaagtgggagtttgtatcacagctgcagtggcacttcattacttcctgcttgtttcttttacttggatgggcctggaggcagtccacatgtatttggctctagtcaaagtcttcaacatatacattccaaattatatccttaaattttgtctagttggttggggaatcccggctatcatggtggcaatcacagtcagtgtgaaaaaagatctgtatggaactctgagcccaacaactccgttttgttggattaaagatgattctatcttttacatctcagtggtggcttatttttgcctcatatttctcatgaatctctccatgttctgcactgttcttgttcaactgaattctgtgaaatcccaaatccagaagactcggcggaagatgatcctgcatgacctcaaaggcacaatgagcctgacattcttacttggcctcacctgggggtttgcattttttgcttggggacccatgaggaactttttcttgtatttgtttgccatttttaacactttgcaaggattcttcatttttgtgtttcactgtgtgatgaaggagagtgtgcgggagcagtggcagatacacctctgctgtgggtggttgcgattggataactcttctgatgggagcagccggtgtcagataaaggttggatataaacaggagggactaaagaaaatctttgagcacaaactgttgacgccatctctcaagtcaactgcaactagctccactttcaaatctttaggctctgcacaaggcacaccttcagaaataagctttccaaatgatgacyttgacaaagatccttactgttcctctccttga

SEQ ID NO: 182 - protein, 1210 aa, Homo sapiens
  VARIANT (1)...(1210): Xaa = Any Amino Acid
MTSSNTQPLLMTSWNIPTAEGSQFPISTTINVPTSNEMETETLHLVPGPLSTFTASQTGLVSKDVMAMSSIPMSGILPNHGLSENPSLSTSLRAITSTLADVKHTFEKMTTSVTPGTTLPSILSGATSGSVISKSPILTWLLSSLPSGSPPATVSNAPHVMTSSTVEVSKSTFLTSDMISAHPFTNLTTLPSATMSTILTRTIPTPTLGGITTGFPTSLPMSINVTDDIVYISTHPEASSRTTITANPRTVSHPSSFSRKTMSPSTTDHTLSVGAMPLPSSTITSSWNRIPTASSPSTLIIPKPTLDSLLNIMTTTSTVPGASFPLISTGVTYPFTATVSSPISSFFETTWLDSTPSFLSTEASTSPTATKSTVSFYNVEMSFSVFVEEPRIPITSVINEFTENSLNSIFQNSEFSLATLETQIKSRDISEEEMVMDRAILEQREGQEMATISYVPYSCVCQVIIKASSSLASSELMRKIKSKIHGNFTHGNFTQDQLTLLVNCEHVAVKKLEPGNCKADETASKYKGTYKWLLTNPTETAQTRCIKNEDGNATRFCSISINTGKSQWEKPKFKQCKLLQELPDKIVDLANITISDENPEDVAEHILNLINESPALGKEETKIIVSKISDISQCDEISMNLTHVMLQIINVVLEKQNNSASDLHEISNEILRIIERPGHKMEFSGQIANLAVAGLALAVLRGDHTFDGMAFSIHSYEEGPDPDIFLGNVPVGGILASIYLPKSLTERIPLSNLQPILFNFFGQTSLFKTKNVTKALTTYVVSASISDMFIQNLADPVVITLQHIGGNQNYGQVHCAFWDFENNNGLGGWNSSGCKVKETNVNYTICQCDHLTHFGVLMDLSRSTVDSVNEQILALITYTGCGISSIFLGVAVVTYIAFHKLRKDYPAKILINLCTALLMLNLVFLINSWLSSFQKVGVCITAAVALHYFLLVSFTWMGLEAVHMYLALVKVFNIYIPNYILKFCLVGWGIPAIMVAITVSVKKDLYGTLSPTTPFCWIKDDSIFYISVVAYFCLIFLMNLSMFCTVLVQLNSVKSQIQKTRRKMILHDLKGTMSLTFLLGLTWGFAFFAWGPMRNFFLYLFAIFNTLQGFFIFVFHCVMKESVREQWQIHLCCGWLRLDNSSDGSSRCQIKVGYKQEGLKKIFEHKLLTPSLKSTATSSTFKSLGSAQGTPSEISFPNDDXDKDPYCSSP

SEQ ID NO: 183 - DNA, 2205 bp, Homo sapiens
  CDS (1)...(2205)
atgagaaaaatcaaaagtaaaatacatggcaacttcacacatggaaacttcacacaagatcaattgacgttattagtaaactgtgaacacgttgcagtgaaaaaactagagcctggaaattgcaaagctgatgaaacagcctctaaatacaaagggacctataagtggctattaaccaaccctacggagacagcccaaaccagatgcataaaaaatgaggatggaaatgccacaagattctgttcaatcagcatcaacacgggcaaatctcagtgggaaaagccaaagtttaaacaatgcaaattgcttcaagaacttcctgacaagattgtggatcttgctaatattaccataagtgatgagaatcctgaggatgttgcagagcatattttaaatttgataaatgaatccccagccctgggtaaagaagagacaaagattattgtttctaaaatatcagatatttcacaatgtgatgagataagtatgaacctaactcatgttatgttacaaataatcaacgttgttttggaaaagcaaaacaattccgcctctgatctgcatgaaataagcaatgaaattctgaggataattgagcgtcctggtcacaagatggagttttctgggcagatagcaaatctggcggtggccgggctggctttggctgtgctgcggggggaccacacgtttgatggcatggctttcagcattcactcctatgaagaaggcccagaccctgacattttcctaggcaatgtccctgtgggagggattttggcttccatatatttgcctaaatcactgacggagagaattcctcttagcaacttacaaccgatcttgtttaatttctttggccaaacttcactctttaagaccaaaaatgtcactaaagcattaaccacatatgttgtgagtgccagcatttcagatatgttcattcaaaacttagctgacccagtggttatcactctgcagcatattggaggaaaccagaattatggtcaagttcactgtgccttttgggattttgagaataataatgggctgggtggatggaattcgtcaggctgtaaagtaaaggaaacaaatgtaaattacacaatctgtcagtgtgaccacctcacccattttggagtcttaatggatttatccaggtctacagtggattcagtgaatgaacagatattagcgcttataacatacaccggatgtggaatctcctccattttcctgggagttgcagtggtgacatacatagcttttcacaaacttcgaaaagattatcctgccaaaattctgatcaacctgtgcacagcactactgatgctaaacctggtatttttgatcaattcttggttgtcatcatttcagaaagtgggagtttgtatcacagctgcagtggcacttcattacttcctgcttgtttcttttacttggatgggcctggaggcagtccacatgtatttggctctagtcaaagtcttcaacatatacattccaaattatatccttaaattttgtctagttggttggggaatcccggctatcatggtggcaatcacagtcagtgtgaaaaaagatctgtatggaactctgagcccaacaactccgttttgttggattaaagatgattctatcttttacatctcagtggtggcttatttttgcctcatatttctcatgaatctctccatgttctgcactgttcttgttcaactgaattctgtgaaatcccaaatccagaagactcggcggaagatgatcctgcatgacctcaaaggcacaatgagcctgacattcttacttggcctcacctgggggtttgcattttttgcttggggacccatgaggaactttttcttgtatttgtttgccatttttaacactttgcaaggattcttcatttttgtgtttcactgtgtgatgaaggagagtgtgcgggagcagtggcagatacacctctgctgtgggtggttgcgattggataactcttctgatgggagcagccggtgtcagataaaggttggatataaacaggagggactaaagaaaatctttgagcacaaactgttgacgccatctctcaagtcaactgcaactagctccactttcaaatctttaggctctgcacaaggcacaccttcagaaataagctttccaaatgatgacyttgacaaagatccttactgttcctctccttga

SEQ ID NO: 184 - protein, 734 aa, Homo sapiens
  VARIANT (1)...(734): Xaa = Any Amino Acid
MRKIKSKIHGNFTHGNFTQDQLTLLVNCEHVAVKKLEPGNCKADETASKYKGTYKWLLTNPTETAQTRCIKNEDGNATRFCSISINTGKSQWEKPKFKQCKLLQELPDKIVDLANITISDENPEDVAEHILNLINESPALGKEETKIIVSKISDISQCDEISMNLTHVMLQIINVVLEKQNNSASDLHEISNEILRIIERPGHKMEFSGQIANLAVAGLALAVLRGDHTFDGMAFSIHSYEEGPDPDIFLGNVPVGGILASIYLPKSLTERIPLSNLQPILFNFFGQTSLFKTKNVTKALTTYVVSASISDMFIQNLADPVVITLQHIGGNQNYGQVHCAFWDFENNNGLGGWNSSGCKVKETNVNYTICQCDHLTHFGVLMDLSRSTVDSVNEQILALITYTGCGISSIFLGVAVVTYIAFHKLRKDYPAKILINLCTALLMLNLVFLINSWLSSFQKVGVCITAAVALHYFLLVSFTWMGLEAVHMYLALVKVFNIYIPNYILKFCLVGWGIPAIMVAITVSVKKDLYGTLSPTTPFCWIKDDSIFYISVVAYFCLIFLMNLSMFCTVLVQLNSVKSQIQKTRRKMILHDLKGTMSLTFLLGLTWGFAFFAWGPMRNFFLYLFAIFNTLQGFFIFVFHCVMKESVREQWQIHLCCGWLRLDNSSDGSSRCQIKVGYKQEGLKKIFEHKLLTPSLKSTATSSTFKSLGSAQGTPSEISFPNDDXDKDPYCSSP

SEQ ID NO: 185 - DNA, 3416 bp, Homo sapiens
  CDS (1)...(3414)
atgacatctagtaatacccaacctctgcttatgacttcctggaacatacccacagctgaaggttctcagtttccaatttccaccactattaatgtacctacatccaatgagatggaaacagagactctacaccttgttcctgggcctttgtcaacattcacagcctctcagactggtctagtatctaaagatgtcatggcaatgtcatcaattcctatgtcaggaattcttcctaaccatgggctttctgagaacccttcattatcaacatctttaagagctatcacttccacattggctgacgttaagcacacatttgagaaaatgaccacatctgtaactcctgggaccacactcccatcaattctttctggtgccacttcaggatctgtaatttcaaagtcacccattctgacatggctcttatctagtctcccttctggctcccctccggcaactgtatctaatgcccctcatgttatgacttcctctacagtagaggtgtcaaaatcaacatttctgacatctgacatgatatcagcgcacccattcactaacttgacaacactaccctctgctactatgagcaccatactcacccgaaccattcctacacctacactgggtggtatcactactggcttcccaacttctctccctatgtctataaatgtcacagatgacattgtgtacatttccacacaccctgaggcatcctccagaaccacaataactgccaaccccaggactgtgtctcatccttcatccttcagcagaaagactatgtcaccttctacaactgaccacactctatctgttggtgccatgcctctgcctagctctacaataacatcttcatggaacagaattccaactgcatcatcaccctctactttaattattcctaagcccacactggactcccttctaaatataatgactactacatccactgttcctggagcctcatttccactcatatccactggggtgacatatccttttacagcaactgtgtcttcaccaatatcgtccttttttgaaacaacttggctggactccacaccttcctttctatctacggaagcatcgacttcgcctactgccaccaagtccacagtttccttctacaatgttgaaatgagcttctctgtctttgttgaagagccaaggatccctattaccagtgttataaatgaatttacggaaaattcgttgaattctatatttcagaacagtgaattttctcttgctactctggaaacccaaattaaaagcagggacatttcagaggaagagatggtcatggatcgagctattttggaacagagagaaggacaagaaatggctacaatttcctatgtaccatacagttgtgtttgtcaggtcatcataaaagccagctcttccttagcatcctctgaattgatgagaaaaatcaaaagtaaaatacatggcaacttcacacatggaaacttcacacaagatcaattgacgttattagtaaactgtgaacacgttgcagtgaaaaaactagagcctggaaattgcaaagctgatgaaacagcctctaaatacaaagggacctataagtggctattaaccaaccctacggagacagcccaaaccagatgcataaaaaatgaggatggaaatgccacaagattctgttcaatcagcatcaacacgggcaaatctcagtgggaaaagccaaagtttaaacaatgcaaattgcttcaagaacttcctgacaagattgtggatcttgctaatattaccataagtgatgagaatcctgaggatgttgcagagcatattttaaatttgataaatgaatccccagccctgggtaaagaagagacaaagattattgtttctaaaatatcagatatttcacaatgtgatgagataagtatgaacctaactcatgttatgttacaaataatcaacgttgttttggaaaagcaaaacaattccgcctctgatctgcatgaaataagcaatgaaattctgaggataattgagcgtcctggtcacaagatggagttttctgggcagatagcaaatctggcggtggccgggctggctttggctgtgctgcggggggaccacacgtttgatggcatggctttcagcattcactcctatgaagaaggcccagaccctgacattttcctaggcaatgtccctgtgggagggattttggcttccatatatttgcctaaatcactgacggagagaattcctcttagcaacttacaaccgatcttgtttaatttctttggccaaacttcactctttaagaccaaaaatgtcactaaagcattaaccacatatgttgtgagtgccagcatttcagatatgttcattcaaaacttagctgacccagtggttatcactctgcagcatattggaggaaaccagaattatggtcaagttcactgtgccttttgggattttgagaataataatgggctgggtggatggaattcgtcaggctgtaaagtaaaggaaacaaatgtaaattacacaatctgtcagtgtgaccacctcacccattttggagtcttaatggatttatccaggtctacagtggattcagtgaatgaacagatattagcgcttataacatacaccggatgtggaatctcctccattttcctgggagttgcagtggtgacatacatagcttttcacaaacttcgaaaagattatcctgccaaaattctgatcaacctgtgcacagcactactgatgctaaacctggtatttttgatcaattcttggttgtcatcatttcagaaagtgggagtttgtatcacagctgcagtggcacttcattacttcctgcttgtttcttttacttggatgggcctggaggcagtccacatgtatttggctctagtcaaagtcttcaacatatacattccaaattatatccttaaattttgtctagttggttggggaatcccggctatcatggtggcaatcacagtcagtgtgaaaaaagatctgtatggaactctgagcccaacaactccgttttgttggattaaagatgattctatcttttacatctcagtggtggcttatttttgcctcatatttctcatgaatctctccatgttctgcactgttcttgttcaactgaattctgtgaaatcccaaatccagaagactcggcggaagatgatcctgcatgacctcaaaggcacaatgagcctgacattcttacttggcctcacctgggggtttgcattttttgcttggggacccatgaggaactttttcttgtatttgtttgccatttttaacactttgcaaggtaactggtgcttttttgccttttctgtggccagctacacatgcagcaaagcttttgttgctttggaaaataatcacctgttggaaacatt

SEQ ID NO: 186 - protein, 1138 aa, Homo sapiens
MTSSNTQPLLMTSWNIPTAEGSQFPISTTINVPTSNEMETETLHLVPGPLSTFTASQTGLVSKDVMAMSSIPMSGILPNHGLSENPSLSTSLRAITSTLADVKHTFEKMTTSVTPGTTLPSILSGATSGSVISKSPILTWLLSSLPSGSPPATVSNAPHVMTSSTVEVSKSTFLTSDMISAHPFTNLTTLPSATMSTILTRTIPTPTLGGITTGFPTSLPMSINVTDDIVYISTHPEASSRTTITANPRTVSHPSSFSRKTMSPSTTDHTLSVGAMPLPSSTITSSWNRIPTASSPSTLIIPKPTLDSLLNIMTTTSTVPGASFPLISTGVTYPFTATVSSPISSFFETTWLDSTPSFLSTEASTSPTATKSTVSFYNVEMSFSVFVEEPRIPITSVINEFTENSLNSIFQNSEFSLATLETQIKSRDISEEEMVMDRAILEQREGQEMATISYVPYSCVCQVIIKASSSLASSELMRKIKSKIHGNFTHGNFTQDQLTLLVNCEHVAVKKLEPGNCKADETASKYKGTYKWLLTNPTETAQTRCIKNEDGNATRFCSISINTGKSQWEKPKFKQCKLLQELPDKIVDLANITISDENPEDVAEHILNLINESPALGKEETKIIVSKISDISQCDEISMNLTHVMLQIINVVLEKQNNSASDLHEISNEILRIIERPGHKMEFSGQIANLAVAGLALAVLRGDHTFDGMAFSIHSYEEGPDPDIFLGNVPVGGILASIYLPKSLTERIPLSNLQPILFNFFGQTSLFKTKNVTKALTTYVVSASISDMFIQNLADPVVITLQHIGGNQNYGQVHCAFWDFENNNGLGGWNSSGCKVKETNVNYTICQCDHLTHFGVLMDLSRSTVDSVNEQILALITYTGCGISSIFLGVAVVTYIAFHKLRKDYPAKILINLCTALLMLNLVFLINSWLSSFQKVGVCITAAVALHYFLLVSFTWMGLEAVHMYLALVKVFNIYIPNYILKFCLVGWGIPAIMVAITVSVKKDLYGTLSPTTPFCWIKDDSIFYISVVAYFCLIFLMNLSMFCTVLVQLNSVKSQIQKTRRKMILHDLKGTMSLTFLLGLTWGFAFFAWGPMRNFFLYLFAIFNTLQGNWCFFAFSVASYTCSKAFVALENNHLLET

SEQ ID NO: 187 - DNA, 1988 bp, Homo sapiens
  CDS (1)...(1986)
atgagaaaaatcaaaagtaaaatacatggcaacttcacacatggaaacttcacacaagatcaattgacgttattagtaaactgtgaacacgttgcagtgaaaaaactagagcctggaaattgcaaagctgatgaaacagcctctaaatacaaagggacctataagtggctattaaccaaccctacggagacagcccaaaccagatgcataaaaaatgaggatggaaatgccacaagattctgttcaatcagcatcaacacgggcaaatctcagtgggaaaagccaaagtttaaacaatgcaaattgcttcaagaacttcctgacaagattgtggatcttgctaatattaccataagtgatgagaatcctgaggatgttgcagagcatattttaaatttgataaatgaatccccagccctgggtaaagaagagacaaagattattgtttctaaaatatcagatatttcacaatgtgatgagataagtatgaacctaactcatgttatgttacaaataatcaacgttgttttggaaaagcaaaacaattccgcctctgatctgcatgaaataagcaatgaaattctgaggataattgagcgtcctggtcacaagatggagttttctgggcagatagcaaatctggcggtggccgggctggctttggctgtgctgcggggggaccacacgtttgatggcatggctttcagcattcactcctatgaagaaggcccagaccctgacattttcctaggcaatgtccctgtgggagggattttggcttccatatatttgcctaaatcactgacggagagaattcctcttagcaacttacaaccgatcttgtttaatttctttggccaaacttcactctttaagaccaaaaatgtcactaaagcattaaccacatatgttgtgagtgccagcatttcagatatgttcattcaaaacttagctgacccagtggttatcactctgcagcatattggaggaaaccagaattatggtcaagttcactgtgccttttgggattttgagaataataatgggctgggtggatggaattcgtcaggctgtaaagtaaaggaaacaaatgtaaattacacaatctgtcagtgtgaccacctcacccattttggagtcttaatggatttatccaggtctacagtggattcagtgaatgaacagatattagcgcttataacatacaccggatgtggaatctcctccattttcctgggagttgcagtggtgacatacatagcttttcacaaacttcgaaaagattatcctgccaaaattctgatcaacctgtgcacagcactactgatgctaaacctggtatttttgatcaattcttggttgtcatcatttcagaaagtgggagtttgtatcacagctgcagtggcacttcattacttcctgcttgtttcttttacttggatgggcctggaggcagtccacatgtatttggctctagtcaaagtcttcaacatatacattccaaattatatccttaaattttgtctagttggttggggaatcccggctatcatggtggcaatcacagtcagtgtgaaaaaagatctgtatggaactctgagcccaacaactccgttttgttggattaaagatgattctatcttttacatctcagtggtggcttatttttgcctcatatttctcatgaatctctccatgttctgcactgttcttgttcaactgaattctgtgaaatcccaaatccagaagactcggcggaagatgatcctgcatgacctcaaaggcacaatgagcctgacattcttacttggcctcacctgggggtttgcattttttgcttggggacccatgaggaactttttcttgtatttgtttgccatttttaacactttgcaaggtaactggtgcttttttgccttttctgtggccagctacacatgcagcaaagcttttgttgctttggaaaataatcacctgttggaaacatt

SEQ ID NO: 188 - protein, 662 aa, Homo sapiens
MRKIKSKIHGNFTHGNFTQDQLTLLVNCEHVAVKKLEPGNCKADETASKYKGTYKWLLTNPTETAQTRCIKNEDGNATRFCSISINTGKSQWEKPKFKQCKLLQELPDKIVDLANITISDENPEDVAEHILNLINESPALGKEETKIIVSKISDISQCDEISMNLTHVMLQIINVVLEKQNNSASDLHEISNEILRIIERPGHKMEFSGQIANLAVAGLALAVLRGDHTFDGMAFSIHSYEEGPDPDIFLGNVPVGGILASIYLPKSLTERIPLSNLQPILFNFFGQTSLFKTKNVTKALTTYVVSASISDMFIQNLADPVVITLQHIGGNQNYGQVHCAFWDFENNNGLGGWNSSGCKVKETNVNYTICQCDHLTHFGVLMDLSRSTVDSVNEQILALITYTGCGISSIFLGVAVVTYIAFHKLRKDYPAKILINLCTALLMLNLVFLINSWLSSFQKVGVCITAAVALHYFLLVSFTWMGLEAVHMYLALVKVFNIYIPNYILKFCLVGWGIPAIMVAITVSVKKDLYGTLSPTTPFCWIKDDSIFYISVVAYFCLIFLMNLSMFCTVLVQLNSVKSQIQKTRRKMILHDLKGTMSLTFLLGLTWGFAFFAWGPMRNFFLYLFAIFNTLQGNWCFFAFSVASYTCSKAFVALENNHLLET

SEQ ID NO: 189 - DNA, 4185 bp, Homo sapiens
caactttgggcatattatctgggattactaacaggtccctatctactgtgaacagtggtacaggggtagctctcacagatacttattccagaatcactgttcctgaaaatatgctttcacctactcatgcagatagtctccatacttccttcaatattcaggtttccccatctctgactagctttaagagtgcttctggacccacaaaaaatgttaaaacaaccaccaattgcctttcttctaatactagaaagatgacttccttgttagaaaagacttccttaacaaactatgccacatctttgaatacccctgtttcataccctccatggaccccatccagtgcaactctaccttctttgacatcatttgtttattcacctcatagtactgaagctgagatctctactccaaagacctctcctcctcccacatcccaaatggttgaatttccagttctgggaacaaagaatgacatctagtaatacccaacctctgcttatgacttcctggaacatacccacagctgaaggttctcagtttccaatttccaccactattaatgtacctacatccaatgagatggaaacagagactctacaccttgttcctgggcctttgtcaacattcacagcctctcagactggtctagtatctaaagatgtcatggcaatgtcatcaattcctatgtcaggaattcttcctaaccatgggctttctgagaacccttcattatcaacatctttaagagctatcacttccacattggctgacgttaagcacacatttgagaaaatgaccacatctgtaactcctgggaccacactcccatcaattctttctggtgccacttcaggatctgtaatttcaaagtcacccattctgacatggctcttatctagtctcccttctggctcccctccggcaactgtatctaatgcccctcatgttatgacttcctctacagtagaggtgtcaaaatcaacatttctgacatctgacatgatatcagcgcacccattcactaacttgacaacactaccctctgctactatgagcaccatactcacccgaaccattcctacacctacactgggtggtatcactactggcttcccaacttctctccctatgtctataaatgtcacagatgacattgtgtacatttccacacaccctgaggcatcctccagaaccacaataactgccaaccccaggactgtgtctcatccttcatccttcagcagaaagactatgtcaccttctacaactgaccacactctatctgttggtgccatgcctctgcctagctctacaataacatcttcatggaacagaattccaactgcatcatcaccctctactttaattattcctaagcccacactggactcccttctaaatataatgactactacatccactgttcctggagcctcatttccactcatatccactggggtgacatatccttttacagcaactgtgtcttcaccaatatcgtccttttttgaaacaacttggctggactccacaccttcctttctatctacggaagcatcgacttcgcctactgccaccaagtccacagtttccttctacaatgttgaaatgagcttctctgtctttgttgaagagccaaggatccctattaccagtgttataaatgaatttacggaaaattcgttgaattctatatttcagaacagtgaattttctcttgctactctggaaacccaaattaaaagcagggacatttcagaggaagagatggtcatggatcgagctattttggaacagagagaaggacaagaaatggctacaatttcctatgtaccatacagttgtgtttgtcaggtcatcataaaagccagctcttccttagcatcctctgaattgatgagaaaaatcaaaagtaaaatacatggcaacttcacacatggaaacttcacacaagatcaattgacgttattagtaaactgtgaacacgttgcagtgaaaaaactagagcctggaaattgcaaagctgatgaaacagcctctaaatacaaagggacctataagtggctattaaccaaccctacggagacagcccaaaccagatgcataaaaaatgaggatggaaatgccacaagattctgttcaatcagcatcaacacgggcaaatctcagtgggaaaagccaaagtttaaacaatgcaaattgcttcaagaacttcctgacaagattgtggatcttgctaatattaccataagtgatgagaatcctgaggatgttgcagagcatattttaaatttgataaatgaatccccagccctgggtaaagaagagacaaagattattgtttctaaaatatcagatatttcacaatgtgatgagataagtatgaacctaactcatgttatgttacaaataatcaacgttgttttggaaaagcaaaacaattccgcctctgatctgcatgaaataagcaatgaaattctgaggataattgagcgtcctggtcacaagatggagttttctgggcagatagcaaatctggcggtggccgggctggctttggctgtgctgcggggggaccacacgtttgatggcatggctttcagcattcactcctatgaagaaggcccagaccctgacattttcctaggcaatgtccctgtgggagggattttggcttccatatatttgcctaaatcactgacggagagaattcctcttagcaacttacaaccgatcttgtttaatttctttggccaaacttcactctttaagaccaaaaatgtcactaaagcattaaccacatatgttgtgagtgccagcatttcagatatgttcattcaaaacttagctgacccagtggttatcactctgcagcatattggaggaaaccagaattatggtcaagttcactgtgccttttgggattttgagaataataatgggctgggtggatggaattcgtcaggctgtaaagtaaaggaaacaaatgtaaattacacaatctgtcagtgtgaccacctcacccattttggagtcttaatggatttatccaggtctacagtggattcagtgaatgaacagatattagcgcttataacatacaccggatgtggaatctcctccattttcctgggagttgcagtggtgacatacatagcttttcacaaacttcgaaaagattatcctgccaaaattctgatcaacctgtgcacagcactactgatgctaaacctggtatttttgatcaattcttggttgtcatcatttcagaaagtgggagtttgtatcacagctgcagtggcacttcattacttcctgcttgtttcttttacttggatgggcctggaggcagtccacatgtatttggctctagtcaaagtcttcaacatatacattccaaattatatccttaaattttgtctagttggttggggaatcccggctatcatggtggcaatcacagtcagtgtgaaaaaagatctgtatggaactctgagcccaacaactccgttttgttggattaaagatgattctatcttttacatctcagtggtggcttatttttgcctcatatttctcatgaatctctccatgttctgcactgttcttgttcaactgaattctgtgaaatcccaaatccagaagactcggcggaagatgatcctgcatgacctcaaaggcacaatgagcctgacattcttacttggcctcacctgggggtttgcattttttgcttggggacccatgaggaactttttcttgtatttgtttgccatttttaacactttgcaaggattcttcatttttgtgtttcactgtgtgatgaaggagagtgtgcgggagcagtggcagatacacctctgctgtgggtggttgcgattggataactcttctgatgggagcagccggtgtcagataaaggttggatataaacaggagggactaaagaaaatctttgagcacaaactgttgacgccatctctcaagtcaactgcaactagctccactttcaaatctttaggctctgcacaaggcacaccttcagaaataagctttccaaatgatgacyttgacaaagatccttactgttcctctccttgatttgtgaagttgygcctaattatgtaaaaagaatataatacctgtggaaataaaaatgaattccaagtggaaaaaaaaaaa

SEQ ID NO: 190 - DNA, 1923 bp, Homo sapiens
  CDS (1)...(1923)
atgactcatatacttttgctgtactacttggtgtttcttttgcccacagagtcctgtaggacattgtatcaggctgcaagcaaaagcaaggagaaggtgcctgccaggccacacggtgtatgcgatggtgtctgtacagactacccccagtgtactcaaccttgccctccagacactcagggaaatatggggttttcatgcaggcaaaagacatggcacaagatcactgacacctgccagactcttaatgccctcaacatctttgaggaggattcacgtttggttcagccatttgaagacaatataaaaataagtgtatatactggaaagtctgagaccataacagatatgttgctacaaaagtgtcccacagatctgtcttgtgtaattagaaacattcagcagtctccctggataccaggaaacattgccgtaattgtgcagctcttacacaacatatcaacagcaatatggacaggtgttgatgaggcaaagatgcagagttacagcaccatagccaaccacattcttaacagcaaaagcatctccaactggactttcattcctgacagaaacagcagctatatcctgctacattcagtcaactcctttgcaagaaggctattcatagataaacatcctgttgacatatcagatgtcttcattcatactatgggcaccaccatatctggagataacattggaaaaaatttcactttttctatgagaattaatgataccagcaatgaagtcactgggagagtgttgatcagcagagatgaacttcggaaggtgccttccccttctcaggtcatcagcattgcatttccaactattggggctattttggaagccagtcttttggaaaatgttactgtaaatgggcttgtcctgtctgccattttgcccaaggaacttaaaagaatctcactgatttttgaaaagatcagcaagtcagaggagaggaggacacagtgtgttggctggcactctgtggagaacagatgggaccagcaggcctgcaaaatgattcaagaaaactcccagcaagctgtttgcaaatgtaggccaagtgaattgtttacctctttctcaattcttatgtcacctcacatcttagagagtctgattctgacttacatcacatatgtaggcctgggcatttctatttgcagcctgatcctttgcttgtccattgaggtcctagtctggagccaagtgacaaagacagagatcacctatttacgccatgtgtgcattgttaacattgcagccactttgctgatggcagatgtgtggttcattgtggcttcctttcttagtggcccaataacacaccacaagggatgtgtggcagccacattttttgttcatttcttttacctttctgtatttttctggatgcttgccaaggcactccttatcctctatggaatcatgattgttttccataccttgcccaagtcagtcctggtggcatctctgttttcagtgggctatggatgccctttggccattgctgccatcactgttgctgccactgaacctggcaaaggctatctacgacctgagatctgctggctcaactgggacatgaccaaagccctcctggccttcgtgatcccagctttggccatcgtggtagtaaacctgatcacagtcacactggtgattgtcaagacccagcgagctgccattggcaattccatgttccaggaagtgagagccattgtgagaatcagcaagaacatcgccatcctcacaccacttctgggactgacctggggatttggagtagccactgtcatcgatgacagatccctggccttccacattatcttctccctgctcaatgcattccaggtaagtccagatgcttctgaccaagtgcaaagtgagagaattcatgaagatgttctgtga

SEQ ID NO: 191 - protein, 640 aa, Homo sapiens
MTHILLLYYLVFLLPTESCRTLYQAASKSKEKVPARPHGVCDGVCTDYPQCTQPCPPDTQGNMGFSCRQKTWHKITDTCQTLNALNIFEEDSRLVQPFEDNIKISVYTGKSETITDMLLQKCPTDLSCVIRNIQQSPWIPGNIAVIVQLLHNISTAIWTGVDEAKMQSYSTIANHILNSKSISNWTFIPDRNSSYILLHSVNSFARRLFIDKHPVDISDVFIHTMGTTISGDNIGKNFTFSMRINDTSNEVTGRVLISRDELRKVPSPSQVISIAFPTIGAILEASLLENVTVNGLVLSAILPKELKRISLIFEKISKSEERRTQCVGWHSVENRWDQQACKMIQENSQQAVCKCRPSELFTSFSILMSPHILESLILTYITYVGLGISICSLILCLSIEVLVWSQVTKTEITYLRHVCIVNIAATLLMADVWFIVASFLSGPITHHKGCVAATFFVHFFYLSVFFWMLAKALLILYGIMIVFHTLPKSVLVASLFSVGYGCPLAIAAITVAATEPGKGYLRPEICWLNWDMTKALLAFVIPALAIVVVNLITVTLVIVKTQRAAIGNSMFQEVRAIVRISKNIAILTPLLGLTWGFGVATVIDDRSLAFHIIFSLLNAFQVSPDASDQVQSERIHEDVL

SEQ ID NO: 192 - DNA, 1737 bp, Homo sapiens
  CDS (1)...(1737)
atggggttttcatgcaggcaaaagacatggcacaagatcactgacacctgccagactcttaatgccctcaacatctttgaggaggattcacgtttggttcagccatttgaagacaatataaaaataagtgtatatactggaaagtctgagaccataacagatatgttgctacaaaagtgtcccacagatctgtcttgtgtaattagaaacattcagcagtctccctggataccaggaaacattgccgtaattgtgcagctcttacacaacatatcaacagcaatatggacaggtgttgatgaggcaaagatgcagagttacagcaccatagccaaccacattcttaacagcaaaagcatctccaactggactttcattcctgacagaaacagcagctatatcctgctacattcagtcaactcctttgcaagaaggctattcatagataaacatcctgttgacatatcagatgtcttcattcatactatgggcaccaccatatctggagataacattggaaaaaatttcactttttctatgagaattaatgataccagcaatgaagtcactgggagagtgttgatcagcagagatgaacttcggaaggtgccttccccttctcaggtcatcagcattgcatttccaactattggggctattttggaagccagtcttttggaaaatgttactgtaaatgggcttgtcctgtctgccattttgcccaaggaacttaaaagaatctcactgatttttgaaaagatcagcaagtcagaggagaggaggacacagtgtgttggctggcactctgtggagaacagatgggaccagcaggcctgcaaaatgattcaagaaaactcccagcaagctgtttgcaaatgtaggccaagtgaattgtttacctctttctcaattcttatgtcacctcacatcttagagagtctgattctgacttacatcacatatgtaggcctgggcatttctatttgcagcctgatcctttgcttgtccattgaggtcctagtctggagccaagtgacaaagacagagatcacctatttacgccatgtgtgcattgttaacattgcagccactttgctgatggcagatgtgtggttcattgtggcttcctttcttagtggcccaataacacaccacaagggatgtgtggcagccacattttttgttcatttcttttacctttctgtatttttctggatgcttgccaaggcactccttatcctctatggaatcatgattgttttccataccttgcccaagtcagtcctggtggcatctctgttttcagtgggctatggatgccctttggccattgctgccatcactgttgctgccactgaacctggcaaaggctatctacgacctgagatctgctggctcaactgggacatgaccaaagccctcctggccttcgtgatcccagctttggccatcgtggtagtaaacctgatcacagtcacactggtgattgtcaagacccagcgagctgccattggcaattccatgttccaggaagtgagagccattgtgagaatcagcaagaacatcgccatcctcacaccacttctgggactgacctggggatttggagtagccactgtcatcgatgacagatccctggccttccacattatcttctccctgctcaatgcattccaggtaagtccagatgcttctgaccaagtgcaaagtgagagaattcatgaagatgttctgtga

SEQ ID NO: 193 - protein, 578 aa, Homo sapiens
MGFSCRQKTWHKITDTCQTLNALNIFEEDSRLVQPFEDNIKISVYTGKSETITDMLLQKCPTDLSCVIRNIQQSPWIPGNIAVIVQLLHNISTAIWTGVDEAKMQSYSTIANHILNSKSISNWTFIPDRNSSYILLHSVNSFARRLFIDKHPVDISDVFIHTMGTTISGDNIGKNFTFSMRINDTSNEVTGRVLISRDELRKVPSPSQVISIAFPTIGAILEASLLENVTVNGLVLSAILPKELKRISLIFEKISKSEERRTQCVGWHSVENRWDQQACKMIQENSQQAVCKCRPSELFTSFSILMSPHILESLILTYITYVGLGISICSLILCLSIEVLVWSQVTKTEITYLRHVCIVNIAATLLMADVWFIVASFLSGPITHHKGCVAATFFVHFFYLSVFFWMLAKALLILYGIMIVFHTLPKSVLVASLFSVGYGCPLAIAAITVAATEPGKGYLRPEICWLNWDMTKALLAFVIPALAIVVVNLITVTLVIVKTQRAAIGNSMFQEVRAIVRISKNIAILTPLLGLTWGFGVATVIDDRSLAFHIIFSLLNAFQVSPDASDQVQSERIHEDVL

SEQ ID NO: 194 - DNA, 2166 bp, Homo sapiens
gaaccatcgcgcccggcccagaagatgacttcttgactcctctctctccgtatctgacactacttcattctttaccaggaaacaagaaagtcagctgtgtggaagacaatgactcatatacttttgctgtactacttggtgtttcttttgcccacagagtcctgtaggacattgtatcaggctgcaagcaaaagcaaggagaaggtgcctgccaggccacacggtgtatgcgatggtgtctgtacagactacccccagtgtactcaaccttgccctccagacactcagggaaatatggggttttcatgcaggcaaaagacatggcacaagatcactgacacctgccagactcttaatgccctcaacatctttgaggaggattcacgtttggttcagccatttgaagacaatataaaaataagtgtatatactggaaagtctgagaccataacagatatgttgctacaaaagtgtcccacagatctgtcttgtgtaattagaaacattcagcagtctccctggataccaggaaacattgccgtaattgtgcagctcttacacaacatatcaacagcaatatggacaggtgttgatgaggcaaagatgcagagttacagcaccatagccaaccacattcttaacagcaaaagcatctccaactggactttcattcctgacagaaacagcagctatatcctgctacattcagtcaactcctttgcaagaaggctattcatagataaacatcctgttgacatatcagatgtcttcattcatactatgggcaccaccatatctggagataacattggaaaaaatttcactttttctatgagaattaatgataccagcaatgaagtcactgggagagtgttgatcagcagagatgaacttcggaaggtgccttccccttctcaggtcatcagcattgcatttccaactattggggctattttggaagccagtcttttggaaaatgttactgtaaatgggcttgtcctgtctgccattttgcccaaggaacttaaaagaatctcactgatttttgaaaagatcagcaagtcagaggagaggaggacacagtgtgttggctggcactctgtggagaacagatgggaccagcaggcctgcaaaatgattcaagaaaactcccagcaagctgtttgcaaatgtaggccaagtgaattgtttacctctttctcaattcttatgtcacctcacatcttagagagtctgattctgacttacatcacatatgtaggcctgggcatttctatttgcagcctgatcctttgcttgtccattgaggtcctagtctggagccaagtgacaaagacagagatcacctatttacgccatgtgtgcattgttaacattgcagccactttgctgatggcagatgtgtggttcattgtggcttcctttcttagtggcccaataacacaccacaagggatgtgtggcagccacattttttgttcatttcttttacctttctgtatttttctggatgcttgccaaggcactccttatcctctatggaatcatgattgttttccataccttgcccaagtcagtcctggtggcatctctgttttcagtgggctatggatgccctttggccattgctgccatcactgttgctgccactgaacctggcaaaggctatctacgacctgagatctgctggctcaactgggacatgaccaaagccctcctggccttcgtgatcccagctttggccatcgtggtagtaaacctgatcacagtcacactggtgattgtcaagacccagcgagctgccattggcaattccatgttccaggaagtgagagccattgtgagaatcagcaagaacatcgccatcctcacaccacttctgggactgacctggggatttggagtagccactgtcatcgatgacagatccctggccttccacattatcttctccctgctcaatgcattccaggtaagtccagatgcttctgaccaagtgcaaagtgagagaattcatgaagatgttctgtgattaggtgcttgtgacattagatttctacataaaagccaatggatttggaatagcatatggagtggggaaataaacttttgttccagagatacctggaaaaaaaaaaaaaaaaaaaaaaaaaaaaaaaaaaaaaaa

SEQ ID NO: 195 - DNA, 4338 bp, Homo sapiens
  CDS (1)...(4338)
atgcagggcccaccgctcctgaccgccgcccacctcctctgcgtgtgcaccgccgcgctggccgtggctcccgggcctcggtttctggtgacagccccagggatcatcaggcccggaggaaatgtgactattggggtggagcttctggaacactgcccttcacaggtgactgtgaaggcggagctgctcaagacagcatcaaacctcactgtctctgtcctggaagcagaaggagtctttgaaaaaggctcttttaagacacttactcttccatcactacctctgaacagtgcagatgagatttatgagctacgtgtaaccggacgtacccaggatgagattttattctctaatagtacccgcttatcatttgagaccaagagaatatctgtcttcattcaaacagacaaggccttatacaagccaaagcaagaagtgaagtttcgcattgttacactcttctcagattttaagccttacaaaacctctttaaacattctcattaaggaccccaaatcaaatttgatccaacagtggttgtcacaacaaagtgatcttggagtcatttccaaaacttttcagctatcttcccatccaatacttggtgactggtctattcaagttcaagtgaatgaccagacatattatcaatcatttcaggtttcagaatatgtattaccaaaatttgaagtgactttgcagacaccattatattgttctatgaattctaagcatttaaatggtaccatcacggcaaagtatacatatgggaagccagtgaaaggagacgtaacgcttacatttttacctttatccttttggggaaagaagaaaaatattacaaaaacatttaagataaatggatctgcaaacttctcttttaatgatgaagagatgaaaaatgtaatggattcttcaaatggactttctgaatacctggatctatcttcccctggaccagtagaaattttaaccacagtgacagaatcagttacaggtatttcaagaaatgtaagcactaatgtgttcttcaagcaacatgattacatcattgagttttttgattatactactgtcttgaagccatctctcaacttcacagccactgtgaaggtaactcgtgctgatggcaaccaactgactcttgaagaaagaagaaataatgtagtcataacagtgacacagagaaactatactgagtactggagcggatctaacagtggaaatcagaaaatggaagctgttcagaaaataaattatactgtcccccaaagtggaacttttaagattgaattcccaatcctggaggattccagtgagctacagttgaaggcctatttccttggtagtaaaagtagcatggcagttcatagtctgtttaagtctcctagtaagacatacatccaactaaaaacaagagatgaaaatataaaggtgggatcgccttttgagttggtggttagtggcaacaaacgattgaaggagttaagctatatggtagtatccaggggacagttggtggctgtaggaaaacaaaattcaacaatgttctctttaacaccagaaaattcttggactccaaaagcctgtgtaattgtgtattatattgaagatgatggggaaattataagtgatgttctaaaaattcctgttcagcttgtttttaaaaataagataaagctatattggagtaaagtgaaagctgaaccatctgagaaagtctctcttaggatctctgtgacacagcctgactccatagttgggattgtagctgttgacaaaagtgtgaatctgatgaatgcctctaatgatattacaatggaaaatgtggtccatgagttggaactttataacacaggatattatttaggcatgttcatgaattcttttgcagtctttcaggaatgtggactctgggtattgacagatgcaaacctcacgaaggattatattgatggtgtttatgacaatgcagaatatgctgagaggtttatggaggaaaatgaaggacatattgtagatattcatgacttttctttgggtagcagtccacatgtccgaaagcattttccagagacttggatttggctagacaccaacatgggttacaggatttaccaagaatttgaagtaactgtacctgattctatcacttcttgggtggctactggttttgtgatctctgaggacctgggtcttggactaacaactactccagtggagctccaagccttccaaccatttttcatttttttgaatcttccctactctgttatcagaggtgaagaatttgctttggaaataactatattcaattatttgaaagatgccactgaggttaaggtaatcattgagaaaagtgacaaatttgatattctaatgacttcaagtgaaataaatgccacaggccaccagcagacccttctggttcccagtgaggatggggcaactgttctttttcccatcaggccaacacatctgggagaaattcctatcacagtcacagctctttcacccactgcttctgatgctgtcacccagatgattttagtaaaggctgaaggaatagaaaaatcatattcacaatccatcttattagacttgactgacaataggctacagagtaccctgaaaactttgagtttctcatttcctcctaatacagtgactggcagtgaaagagttcagatcactgcaattggagatgttcttggtccttccatcaatggcttagcctcattgattcggatgccttatggctgtggtgaacagaacatgataaattttgctccaaatatttacattttggattatctgactaaaaagaaacaactgacagataatttgaaagaaaaagctctttcatttatgaggcaaggttaccagagagaacttctctatcagagggaagatggctctttcagtgcttttgggaattatgacccttctgggagcacttggttgtcagcttttgttttaagatgtttccttgaagccgatccttacatagatattgatcagaatgtgttacacagaacatacacttggcttaaaggacatcagaaatccaacggtgaattttgggatccaggaagagtgattcatagtgagcttcaaggtggcaataaaagtccagtaacacttacagcctatattgtaacttctctcctgggatatagaaagtatcagcctaacattgatgtgcaagagtctatccattttttggagtctgaattcagtagaggaatttcagacaattatactctagcccttataacttatgcattgtcatcagtggggagtcctaaagcgaaggaagctttgaatatgctgacttggagagcagaacaagaaggtggcatgcaattctgggtgtcatcagagtccaaactttctgactcctggcagccacgctccctggatattgaagttgcagcctatgcactgctctcacacttcttacaatttcagacttctgagggaatcccaattatgaggtggctaagcaggcaaagaaatagcttgggtggttttgcatctactcaggataccactgtggctttaaaggctctgtctgaatttgcagccctaatgaatacagaaaggacaaatatccaagtgaccgtgacggggcctagctcaccaagtcctgtaaagtttctgattgacacacacaaccgcttactccttcagacagcagagcttgctgtggtacagccaatggcagttaatatttccgcaaatggttttggatttgctatttgtcagctcaatgttgtatataatgtgaaggcttctgggtcttctagaagacgaagatctatccaaaatcaagaagcctttgatttagatgttgctgtaaaagaaaataaagatgatctcaatcatgtggatttgaatgtgtgtacaagcttttcgggcccgggtaggagtggcatggctcttatggaagttaacctattaagtggctttatggtgccttcagaagcaatttctctgagcgagacagtgaagaaagtggaatatgatcatggaaaactcaacctctatttagattctgtaaatgaaacccagttttgtgttaatattcctgctgtgagaaactttaaagtttcaaatacccaagatgcttcagtgtccatagtggattactatgagccaaggagacaggcggtgagaagttacaactctgaagtgaagctgtcctcctgtgacctttgcagtgatgtccagggctgccgtccttgtgaggatggagcttcaggctcccatcatcactcttcagtcatttttattttctgtttcaagcttctgtactttatggaactttggctgtga

SEQ ID NO: 196 - protein, 1445 aa, Homo sapiens
MQGPPLLTAAHLLCVCTAALAVAPGPRFLVTAPGIIRPGGNVTIGVELLEHCPSQVTVKAELLKTASNLTVSVLEAEGVFEKGSFKTLTLPSLPLNSADEIYELRVTGRTQDEILFSNSTRLSFETKRISVFIQTDKALYKPKQEVKFRIVTLFSDFKPYKTSLNILIKDPKSNLIQQWLSQQSDLGVISKTFQLSSHPILGDWSIQVQVNDQTYYQSFQVSEYVLPKFEVTLQTPLYCSMNSKHLNGTITAKYTYGKPVKGDVTLTFLPLSFWGKKKNITKTFKINGSANFSFNDEEMKNVMDSSNGLSEYLDLSSPGPVEILTTVTESVTGISRNVSTNVFFKQHDYIIEFFDYTTVLKPSLNFTATVKVTRADGNQLTLEERRNNVVITVTQRNYTEYWSGSNSGNQKMEAVQKINYTVPQSGTFKIEFPILEDSSELQLKAYFLGSKSSMAVHSLFKSPSKTYIQLKTRDENIKVGSPFELVVSGNKRLKELSYMVVSRGQLVAVGKQNSTMFSLTPENSWTPKACVIVYYIEDDGEIISDVLKIPVQLVFKNKIKLYWSKVKAEPSEKVSLRISVTQPDSIVGIVAVDKSVNLMNASNDITMENVVHELELYNTGYYLGMFMNSFAVFQECGLWVLTDANLTKDYIDGVYDNAEYAERFMEENEGHIVDIHDFSLGSSPHVRKHFPETWIWLDTNMGYRIYQEFEVTVPDSITSWVATGFVISEDLGLGLTTTPVELQAFQPFFIFLNLPYSVIRGEEFALEITIFNYLKDATEVKVIIEKSDKFDILMTSSEINATGHQQTLLVPSEDGATVLFPIRPTHLGEIPITVTALSPTASDAVTQMILVKAEGIEKSYSQSILLDLTDNRLQSTLKTLSFSFPPNTVTGSERVQITAIGDVLGPSINGLASLIRMPYGCGEQNMINFAPNIYILDYLTKKKQLTDNLKEKALSFMRQGYQRELLYQREDGSFSAFGNYDPSGSTWLSAFVLRCFLEADPYIDIDQNVLHRTYTWLKGHQKSNGEFWDPGRVIHSELQGGNKSPVTLTAYIVTSLLGYRKYQPNIDVQESIHFLESEFSRGISDNYTLALITYALSSVGSPKAKEALNMLTWRAEQEGGMQFWVSSESKLSDSWQPRSLDIEVAAYALLSHFLQFQTSEGIPIMRWLSRQRNSLGGFASTQDTTVALKALSEFAALMNTERTNIQVTVTGPSSPSPVKFLIDTHNRLLLQTAELAVVQPMAVNISANGFGFAICQLNVVYNVKASGSSRRRRSIQNQEAFDLDVAVKENKDDLNHVDLNVCTSFSGPGRSGMALMEVNLLSGFMVPSEAISLSETVKKVEYDHGKLNLYLDSVNETQFCVNIPAVRNFKVSNTQDASVSIVDYYEPRRQAVRSYNSEVKLSSCDLCSDVQGCRPCEDGASGSHHHSSVIFIFCFKLLYFMELWL

SEQ ID NO: 197 - DNA, 4287 bp, Homo sapiens
  CDS (1)...(4287)
atgcagggcccaccgctcctgaccgccgcccacctcctctgcgtgtgcaccgccgcgctggccgtggctcccgggcctcggtttctggtgacagccccagggatcatcaggcccggaggaaatgtgactattggggtggagcttctggaacactgcccttcacaggtgactgtgaaggcggagctgctcaagacagcatcaaacctcactgtctctgtcctggaagcagaaggagtctttgaaaaaggctcttttaagacacttactcttccatcactacctctgaacagtgcagatgagatttatgagctacgtgtaaccggacgtacccaggatgagattttattctctaatagtacccgcttatcatttgagaccaagagaatatctgtcttcattcaaacagacaaggccttatacaagccaaagcaagaagtgaagtttcgcattgttacactcttctcagattttaagccttacaaaacctctttaaacattctcattaaggaccccaaatcaaatttgatccaacagtggttgtcacaacaaagtgatcttggagtcatttccaaaacttttcagctatcttcccatccaatacttggtgactggtctattcaagttcaagtgaatgaccagacatattatcaatcatttcaggtttcagaatatgtattaccaaaatttgaagtgactttgcagacaccattatattgttctatgaattctaagcatttaaatggtaccatcacggcaaagtatacatatgggaagccagtgaaaggagacgtaacgcttacatttttacctttatccttttggggaaagaagaaaaatattacaaaaacatttaagataaatggatctgcaaacttctcttttaatgatgaagagatgaaaaatgtaatggattcttcaaatggactttctgaatacctggatctatcttcccctggaccagtagaaattttaaccacagtgacagaatcagttacaggtatttcaagaaatgtaagcactaatgtgttcttcaagcaacatgattacatcattgagttttttgattatactactgtcttgaagccatctctcaacttcacagccactgtgaaggtaactcgtgctgatggcaaccaactgactcttgaagaaagaagaaataatgtagtcataacagtgacacagagaaactatactgagtactggagcggatctaacagtggaaatcagaaaatggaagctgttcagaaaataaattatactgtcccccaaagtggaacttttaagattgaattcccaatcctggaggattccagtgagctacagttgaaggcctatttccttggtagtaaaagtagcatggcagttcatagtctgtttaagtctcctagtaagacatacatccaactaaaaacaagagatgaaaatataaaggtgggatcgccttttgagttggtggttagtggcaacaaacgattgaaggagttaagctatatggtagtatccaggggacagttggtggctgtaggaaaacaaaattcaacaatgttctctttaacaccagaaaattcttggactccaaaagcctgtgtaattgtgtattatattgaagatgatggggaaattataagtgatgttctaaaaattcctgttcagcttgtttttaaaaataagataaagctatattggagtaaagtgaaagctgaaccatctgagaaagtctctcttaggatctctgtgacacagcctgactccatagttgggattgtagctgttgacaaaagtgtgaatctgatgaatgcctctaatgatattacaatggaaaatgtggtccatgagttggaactttataacacaggatattatttaggcatgttcatgaattcttttgcagtctttcaggaatgtggactctgggtattgacagatgcaaacctcacgaaggattatattgatggtgtttatgacaatgcagaatatgctgagaggtttatggaggaaaatgaaggacatattgtagatattcatgacttttctttgggtagcagtccacatgtccgaaagcattttccagagacttggatttggctagacaccaacatgggttacaggatttaccaagaatttgaagtaactgtacctgattctatcacttcttgggtggctactggttttgtgatctctgaggacctgggtcttggactaacaactactccagtggagctccaagccttccaaccatttttcatttttttgaatcttccctactctgttatcagaggtgaagaatttgctttggaaataactatattcaattatttgaaagatgccactgaggttaaggtaatcattgagaaaagtgacaaatttgatattctaatgacttcaagtgaaataaatgccacaggccaccagcagacccttctggttcccagtgaggatggggcaactgttctttttcccatcaggccaacacatctgggagaaattcctatcacagtcacagctctttcacccactgcttctgatgctgtcacccagatgattttagtaaaggctgaaggaatagaaaaatcatattcacaatccatcttattagacttgactgacaataggctacagagtaccctgaaaactttgagtttctcatttcctcctaatacagtgactggcagtgaaagagttcagatcactgcaattggagatgttcttggtccttccatcaatggcttagcctcattgattcggatgccttatggctgtggtgaacagaacatgataaattttgctccaaatatttacattttggattatctgactaaaaagaaacaactgacagataatttgaaagaaaaagctctttcatttatgaggcaaggttaccagagagaacttctctatcagagggaagatggctctttcagtgcttttgggaattatgacccttctgggagcacttggttgtcagcttttgttttaagatgtttccttgaagccgatccttacatagatattgatcagaatgtgttacacagaacatacacttggcttaaaggacatcagaaatccaacggtgaattttgggatccaggaagagtgattcatagtgagcttcaaggtggcaataaaagtccagtaacacttacagcctatattgtaacttctctcctgggatatagaaagtatcagcctaacattgatgtgcaagagtctatccattttttggagtctgaattcagtagaggaatttcagacaattatactctagcccttataacttatgcattgtcatcagtggggagtcctaaagcgaaggaagctttgaatatgctgacttggagagcagaacaagaaggtggcatgcaattctgggtgtcatcagagtccaaactttctgactcctggcagccacgctccctggatattgaagttgcagcctatgcactgctctcacacttcttacaatttcagacttctgagggaatcccaattatgaggtggctaagcaggcaaagaaatagcttgggtggttttgcatctactcaggataccactgtggctttaaaggctctgtctgaatttgcagccctaatgaatacagaaaggacaaatatccaagtgaccgtgacggggcctagctcaccaagtcctcttgctgtggtacagccaatggcagttaatatttccgcaaatggttttggatttgctatttgtcagctcaatgttgtatataatgtgaaggcttctgggtcttctagaagacgaagatctatccaaaatcaagaagcctttgatttagatgttgctgtaaaagaaaataaagatgatctcaatcatgtggatttgaatgtgtgtacaagcttttcgggcccgggtaggagtggcatggctcttatggaagttaacctattaagtggctttatggtgccttcagaagcaatttctctgagcgagacagtgaagaaagtggaatatgatcatggaaaactcaacctctatttagattctgtaaatgaaacccagttttgtgttaatattcctgctgtgagaaactttaaagtttcaaatacccaagatgcttcagtgtccatagtggattactatgagccaaggagacaggcggtgagaagttacaactctgaagtgaagctgtcctcctgtgacctttgcagtgatgtccagggctgccgtccttgtgaggatggagcttcaggctcccatcatcactcttcagtcatttttattttctgtttcaagcttctgtactttatggaactttggctgtga

SEQ ID NO: 198 - protein, 1428 aa, Homo sapiens
MQGPPLLTAAHLLCVCTAALAVAPGPRFLVTAPGIIRPGGNVTIGVELLEHCPSQVTVKAELLKTASNLTVSVLEAEGVFEKGSFKTLTLPSLPLNSADEIYELRVTGRTQDEILFSNSTRLSFETKRISVFIQTDKALYKPKQEVKFRIVTLFSDFKPYKTSLNILIKDPKSNLIQQWLSQQSDLGVISKTFQLSSHPILGDWSIQVQVNDQTYYQSFQVSEYVLPKFEVTLQTPLYCSMNSKHLNGTITAKYTYGKPVKGDVTLTFLPLSFWGKKKNITKTFKINGSANFSFNDEEMKNVMDSSNGLSEYLDLSSPGPVEILTTVTESVTGISRNVSTNVFFKQHDYIIEFFDYTTVLKPSLNFTATVKVTRADGNQLTLEERRNNVVITVTQRNYTEYWSGSNSGNQKMEAVQKINYTVPQSGTFKIEFPILEDSSELQLKAYFLGSKSSMAVHSLFKSPSKTYIQLKTRDENIKVGSPFELVVSGNKRLKELSYMVVSRGQLVAVGKQNSTMFSLTPENSWTPKACVIVYYIEDDGEIISDVLKIPVQLVFKNKIKLYWSKVKAEPSEKVSLRISVTQPDSIVGIVAVDKSVNLMNASNDITMENVVHELELYNTGYYLGMFMNSFAVFQECGLWVLTDANLTKDYIDGVYDNAEYAERFMEENEGHIVDIHDFSLGSSPHVRKHFPETWIWLDTNMGYRIYQEFEVTVPDSITSWVATGFVISEDLGLGLTTTPVELQAFQPFFIFLNLPYSVIRGEEFALEITIFNYLKDATEVKVIIEKSDKFDILMTSSEINATGHQQTLLVPSEDGATVLFPIRPTHLGEIPITVTALSPTASDAVTQMILVKAEGIEKSYSQSILLDLTDNRLQSTLKTLSFSFPPNTVTGSERVQITAIGDVLGPSINGLASLIRMPYGCGEQNMINFAPNIYILDYLTKKKQLTDNLKEKALSFMRQGYQRELLYQREDGSFSAFGNYDPSGSTWLSAFVLRCFLEADPYIDIDQNVLHRTYTWLKGHQKSNGEFWDPGRVIHSELQGGNKSPVTLTAYIVTSLLGYRKYQPNIDVQESIHFLESEFSRGISDNYTLALITYALSSVGSPKAKEALNMLTWRAEQEGGMQFWVSSESKLSDSWQPRSLDIEVAAYALLSHFLQFQTSEGIPIMRWLSRQRNSLGGFASTQDTTVALKALSEFAALMNTERTNIQVTVTGPSSPSPLAVVQPMAVNISANGFGFAICQLNVVYNVKASGSSRRRRSIQNQEAFDLDVAVKENKDDLNHVDLNVCTSFSGPGRSGMALMEVNLLSGFMVPSEAISLSETVKKVEYDHGKLNLYLDSVNETQFCVNIPAVRNFKVSNTQDASVSIVDYYEPRRQAVRSYNSEVKLSSCDLCSDVQGCRPCEDGASGSHHHSSVIFIFCFKLLYFMELWL

SEQ ID NO: 199 - DNA, 4903 bp, Homo sapiens
ggaggggtggagcctccaagtcctgtctcaatttagatctctcactctgctgttaggcgcgcccatttcagattactaaactcgaattaagagggaaaaaaaatcagggaggaggtggcaagccacaccccacggtgcccgcgaacttccccggcaacggactgtagcccaggcagacgccgtccccatttcaggtgtcgtaagcttgaattcaataactataacggtcctaaggtagcgaagcgagatgcagggcccaccgctcctgaccgccgcccacctcctctgcgtgtgcaccgccgcgctggccgtggctcccgggcctcggtttctggtgacagccccagggatcatcaggcccggaggaaatgtgactattggggtggagcttctggaacactgcccttcacaggtgactgtgaaggcggagctgctcaagacagcatcaaacctcactgtctctgtcctggaagcagaaggagtctttgaaaaaggctcttttaagacacttactcttccatcactacctctgaacagtgcagatgagatttatgagctacgtgtaaccggacgtacccaggatgagattttattctctaatagtacccgcttatcatttgagaccaagagaatatctgtcttcattcaaacagacaaggccttatacaagccaaagcaagaagtgaagtttcgcattgttacactcttctcagattttaagccttacaaaacctctttaaacattctcattaaggaccccaaatcaaatttgatccaacagtggttgtcacaacaaagtgatcttggagtcatttccaaaacttttcagctatcttcccatccaatacttggtgactggtctattcaagttcaagtgaatgaccagacatattatcaatcatttcaggtttcagaatatgtattaccaaaatttgaagtgactttgcagacaccattatattgttctatgaattctaagcatttaaatggtaccatcacggcaaagtatacatatgggaagccagtgaaaggagacgtaacgcttacatttttacctttatccttttggggaaagaagaaaaatattacaaaaacatttaagataaatggatctgcaaacttctcttttaatgatgaagagatgaaaaatgtaatggattcttcaaatggactttctgaatacctggatctatcttcccctggaccagtagaaattttaaccacagtgacagaatcagttacaggtatttcaagaaatgtaagcactaatgtgttcttcaagcaacatgattacatcattgagttttttgattatactactgtcttgaagccatctctcaacttcacagccactgtgaaggtaactcgtgctgatggcaaccaactgactcttgaagaaagaagaaataatgtagtcataacagtgacacagagaaactatactgagtactggagcggatctaacagtggaaatcagaaaatggaagctgttcagaaaataaattatactgtcccccaaagtggaacttttaagattgaattcccaatcctggaggattccagtgagctacagttgaaggcctatttccttggtagtaaaagtagcatggcagttcatagtctgtttaagtctcctagtaagacatacatccaactaaaaacaagagatgaaaatataaaggtgggatcgccttttgagttggtggttagtggcaacaaacgattgaaggagttaagctatatggtagtatccaggggacagttggtggctgtaggaaaacaaaattcaacaatgttctctttaacaccagaaaattcttggactccaaaagcctgtgtaattgtgtattatattgaagatgatggggaaattataagtgatgttctaaaaattcctgttcagcttgtttttaaaaataagataaagctatattggagtaaagtgaaagctgaaccatctgagaaagtctctcttaggatctctgtgacacagcctgactccatagttgggattgtagctgttgacaaaagtgtgaatctgatgaatgcctctaatgatattacaatggaaaatgtggtccatgagttggaactttataacacaggatattatttaggcatgttcatgaattcttttgcagtctttcaggaatgtggactctgggtattgacagatgcaaacctcacgaaggattatattgatggtgtttatgacaatgcagaatatgctgagaggtttatggaggaaaatgaaggacatattgtagatattcatgacttttctttgggtagcagtccacatgtccgaaagcattttccagagacttggatttggctagacaccaacatgggttacaggatttaccaagaatttgaagtaactgtacctgattctatcacttcttgggtggctactggttttgtgatctctgaggacctgggtcttggactaacaactactccagtggagctccaagccttccaaccatttttcatttttttgaatcttccctactctgttatcagaggtgaagaatttgctttggaaataactatattcaattatttgaaagatgccactgaggttaaggtaatcattgagaaaagtgacaaatttgatattctaatgacttcaagtgaaataaatgccacaggccaccagcagacccttctggttcccagtgaggatggggcaactgttctttttcccatcaggccaacacatctgggagaaattcctatcacagtcacagctctttcacccactgcttctgatgctgtcacccagatgattttagtaaaggctgaaggaatagaaaaatcatattcacaatccatcttattagacttgactgacaataggctacagagtaccctgaaaactttgagtttctcatttcctcctaatacagtgactggcagtgaaagagttcagatcactgcaattggagatgttcttggtccttccatcaatggcttagcctcattgattcggatgccttatggctgtggtgaacagaacatgataaattttgctccaaatatttacattttggattatctgactaaaaagaaacaactgacagataatttgaaagaaaaagctctttcatttatgaggcaaggttaccagagagaacttctctatcagagggaagatggctctttcagtgcttttgggaattatgacccttctgggagcacttggttgtcagcttttgttttaagatgtttccttgaagccgatccttacatagatattgatcagaatgtgttacacagaacatacacttggcttaaaggacatcagaaatccaacggtgaattttgggatccaggaagagtgattcatagtgagcttcaaggtggcaataaaagtccagtaacacttacagcctatattgtaacttctctcctgggatatagaaagtatcagcctaacattgatgtgcaagagtctatccattttttggagtctgaattcagtagaggaatttcagacaattatactctagcccttataacttatgcattgtcatcagtggggagtcctaaagcgaaggaagctttgaatatgctgacttggagagcagaacaagaaggtggcatgcaattctgggtgtcatcagagtccaaactttctgactcctggcagccacgctccctggatattgaagttgcagcctatgcactgctctcacacttcttacaatttcagacttctgagggaatcccaattatgaggtggctaagcaggcaaagaaatagcttgggtggttttgcatctactcaggataccactgtggctttaaaggctctgtctgaatttgcagccctaatgaatacagaaaggacaaatatccaagtgaccgtgacggggcctagctcaccaagtcctgtaaagtttctgattgacacacacaaccgcttactccttcagacagcagagcttgctgtggtacagccaatggcagttaatatttccgcaaatggttttggatttgctatttgtcagctcaatgttgtatataatgtgaaggcttctgggtcttctagaagacgaagatctatccaaaatcaagaagcctttgatttagatgttgctgtaaaagaaaataaagatgatctcaatcatgtggatttgaatgtgtgtacaagcttttcgggcccgggtaggagtggcatggctcttatggaagttaacctattaagtggctttatggtgccttcagaagcaatttctctgagcgagacagtgaagaaagtggaatatgatcatggaaaactcaacctctatttagattctgtaaatgaaacccagttttgtgttaatattcctgctgtgagaaactttaaagtttcaaatacccaagatgcttcagtgtccatagtggattactatgagccaaggagacaggcggtgagaagttacaactctgaagtgaagctgtcctcctgtgacctttgcagtgatgtccagggctgccgtccttgtgaggatggagcttcaggctcccatcatcactcttcagtcatttttattttctgtttcaagcttctgtactttatggaactttggctgtgatttatttttaaaggactctgtgtaacactaacatttccagtagtcacatgtgattgttttgttttcgtagaagaatactgcttctattttgaaaaaagagttttttttctttctatggggttgcagggatggtgtacaacaggtcctagcatgtatagctgcatagatttcttcacctgatctttgtgtggaagatcagaatgaatgcagttgtgtgtctatattttcccctctcaaaatcttttagaatttttttggaggtgtttgttttctccagaataaaggtattactttagaaaaaaaaaaaaaaaaaaaaaa

SEQ ID NO: 200 - DNA, 3747 bp, Homo sapiens
  CDS (1)...(3747)
atgcaagctggccccaccagtggtgaaagcggatgcccagcacataacagcaccttgtcctgtctgtgtcctctctgtctcttcaggctcttgagcaataacaagatcacggggctccgcaatggctccttcctgggactgtcactgctggagaagctggacctgaggaacaacatcatcagcacagtgcagccgggcgccttcctgggcctgggggagctgaagcgtttagatctctccaacaaccggattggctgtctcacctccgagaccttccagggcctccccaggcttctccgactaaacatatctggaaacatcttctccagtctgcaacctggggtctttgatgagctgccagcccttaaggttgtggacttgggcaccgagttcctgacctgtgactgccacctgcgctggctgctgccctgggcccagaatcgctccctgcagctgtcggaacacacgctctgtgcttaccccagtgccctgcatgctcaggccctgggcagcctccaggaggcccagctctgctgcgagggggccctggagctgcacacacaccacctcatcccgtccctacgccaagtggtgttccagggggatcggctgcccttccagtgctctgccagctacctgggcaacgacacccgcatccgctggtaccacaaccgagcccctgtggagggtgatgagcaggcgggcatcctcctggccgagagcctcatccacgactgcaccttcatcaccagtgagctgacgctgtctcacatcggcgtgtgggcctcaggcgagtgggagtgcaccgtgtccatggcccaaggcaacgccagcaagaaggtggagatcgtggtgctggagacctctgcctcctactgccccgccgagcgtgttgccaacaaccgcggggacttcaggtggccccgaactctggctggcatcacagcctaccagtcctgcctgcagtatcccttcacctcagtgcccctgggcgggggtgccccgggcacccgagcctcccgccggtgtgaccgtgccggccgctgggagccaggggactactcccactgtctctacaccaacgacatcaccagggtgctgtacaccttcgtgctgatgcccatcaatgcctccaatgcgctgaccctggctcaccagctgcgcgtgtacacagccgaggccgctagcttttcagacatgatggatgtagtctatgtggctcagatgatccagaaatttttgggttatgtcgaccagatcaaagagctggtagaggtgatggtggacatggccagcaacctgatgctggtggacgagcacctgctgtggctggcccagcgcgaggacaaggcctgcagccgcatcgtgggtgccctggagcgcattgggggggccgccctcagcccccatgcccagcacatctcagtgaatgcgaggaacgtggcattggaggcctacctcatcaagccgcacagctacgtgggcctgacctgcacagccttccagaggagggagggaggggtgccgggcacacggccaggaagccctggccagaaccccccacctgagcccgagcccccagctgaccagcagctccgcttccgctgcaccaccgggaggcccaatgtttctctgtcgtccttccacatcaagaacagcgtggccctggcctccatccagctgcccccgagtctattctcatcccttccggctgccctggctcccccggtgcccccagactgcaccctgcaactgctcgtcttccgaaatggccgcctcttccacagccacagcaacacctcccgccctggagctgctgggcctggcaagaggcgtggcgtggccacccccgtcatcttcgcaggaaccagtggctgtggcgtgggaaacctgacagagccagtggccgtttcgctgcggcactgggctgagggagccgaacctgtggccgcttggtggagccaggaggggcccggggaggctgggggctggacctcggagggctgccagctccgctccagccagcccaatgtcagcgccctgcactgccagcacttgggcaatgtggccgtgctcatggagctgagcgcctttcccagggaggtggggggcgccggggcagggctgcaccccgtggtatacccctgcacggccttgctgctgctctgcctcttcgccaccatcatcacctacatcctcaaccacagctccatccgtgtgtcccggaaaggctggcacatgctgctgaacttgtgcttccacatagccatgacctctgctgtctttgcggggggcatcacactcaccaactaccagatggtctgccaggcggtgggcatcaccctgcactactcctccctatccacgctgctctggatgggcgtgaaggcgcgagtgctccataaggagctcacctggagggcaccccctccgcaagaaggggaccccgctctgcctactcccagtcctatgctccgctgctggctggtgtggcgtccaagccttggcgccttctacatccctgtggctttgattctgctcatcacctggatctatttcctgtgcgccgggctacgcttacggggtcctctggcacagaaccccaaggcgggcaacagcagggcctccctggaggcaggggaggagctgaggggttccaccaggctcaggggcagcggccccctcctgagtgactcaggttcccttcttgctactgggagcgcgcgagtggggacgcccgggcccccggaggatggtgacagcctctattctccgggagtccagctaggggcgctggtgaccacgcacttcctgtacttggccatgtgggcctgcggggctctggcagtgtcccagcgctggctgccccgggtggtgtgcagctgcttgtacggggtggcagcctccgccctgggcctcttcgtcttcactcaccactgtgccaggcggagggacgtgagagcctcgtggcgcgcctgctgcccccctgcctctcccgcggccccccatgccccgccccgggccctgcccgccgccgcagaggacggttccccggtgttcggggaggggcccccctccctcaagtcctccccaagcggcagcagcggccatccgctggctctgggcccctgcaagctcaccaacctgcagctggcccagagtcaggtgtgcgaggcgggggcggcggccggcggggaaggagagccggagccggcgggcacccggggaaacctcgcccaccgccaccccaacaacgtgcaccacgggcgtcgggcgcacaagagccgggccaagggacaccgcgcgggggaggcctgcggcaagaaccggctcaaggccctgcgcgggggcgcggcgggggcgctggagctgctgtccagcgagagcggtagtctgcacaacagccccaccgacagctacctgggcagcagccgcaacagcccgggcgccggcctgcagctggaaggcgagcccatgctcacgccgtccgagggcagcgacaccagcgccgcgccgctttctgaggcgggccgggcaggccagcgccgcagcgccagccgcgacagtctcaagggcggcggcgcgctggagaaggagagccatcgccgctcgtacccgctcaacgccgccagcctaaacggcgcccccaaggggggcaagtacgacgacgtcaccctgatgggcgcggaggtagccagcggcggctgcatgaagaccggactctggaagagcgaaactaccgtctaa

SEQ ID NO: 201 - protein, 1248 aa, Homo sapiens
MQAGPTSGESGCPAHNSTLSCLCPLCLFRLLSNNKITGLRNGSFLGLSLLEKLDLRNNIISTVQPGAFLGLGELKRLDLSNNRIGCLTSETFQGLPRLLRLNISGNIFSSLQPGVFDELPALKVVDLGTEFLTCDCHLRWLLPWAQNRSLQLSEHTLCAYPSALHAQALGSLQEAQLCCEGALELHTHHLIPSLRQVVFQGDRLPFQCSASYLGNDTRIRWYHNRAPVEGDEQAGILLAESLIHDCTFITSELTLSHIGVWASGEWECTVSMAQGNASKKVEIVVLETSASYCPAERVANNRGDFRWPRTLAGITAYQSCLQYPFTSVPLGGGAPGTRASRRCDRAGRWEPGDYSHCLYTNDITRVLYTFVLMPINASNALTLAHQLRVYTAEAASFSDMMDVVYVAQMIQKFLGYVDQIKELVEVMVDMASNLMLVDEHLLWLAQREDKACSRIVGALERIGGAALSPHAQHISVNARNVALEAYLIKPHSYVGLTCTAFQRREGGVPGTRPGSPGQNPPPEPEPPADQQLRFRCTTGRPNVSLSSFHIKNSVALASIQLPPSLFSSLPAALAPPVPPDCTLQLLVFRNGRLFHSHSNTSRPGAAGPGKRRGVATPVIFAGTSGCGVGNLTEPVAVSLRHWAEGAEPVAAWWSQEGPGEAGGWTSEGCQLRSSQPNVSALHCQHLGNVAVLMELSAFPREVGGAGAGLHPVVYPCTALLLLCLFATIITYILNHSSIRVSRKGWHMLLNLCFHIAMTSAVFAGGITLTNYQMVCQAVGITLHYSSLSTLLWMGVKARVLHKELTWRAPPPQEGDPALPTPSPMLRCWLVWRPSLGAFYIPVALILLITWIYFLCAGLRLRGPLAQNPKAGNSRASLEAGEELRGSTRLRGSGPLLSDSGSLLATGSARVGTPGPPEDGDSLYSPGVQLGALVTTHFLYLAMWACGALAVSQRWLPRVVCSCLYGVAASALGLFVFTHHCARRRDVRASWRACCPPASPAAPHAPPRALPAAAEDGSPVFGEGPPSLKSSPSGSSGHPLALGPCKLTNLQLAQSQVCEAGAAAGGEGEPEPAGTRGNLAHRHPNNVHHGRRAHKSRAKGHRAGEACGKNRLKALRGGAAGALELLSSESGSLHNSPTDSYLGSSRNSPGAGLQLEGEPMLTPSEGSDTSAAPLSEAGRAGQRRSASRDSLKGGGALEKESHRRSYPLNAASLNGAPKGGKYDDVTLMGAEVASGGCMKTGLWKSETTV

SEQ ID NO: 202 - DNA, 3837 bp, Homo sapiens
  CDS (1)...(3837)
atgcaagctggccccaccagtggtgaaagcggatgcccagcacataacagcaccttgtcctgtctgtgtcctctctgtctcttcaggctcttgagcaataacaagatcacggggctccgcaatggctccttcctgggactgtcactgctggagaagctggacctgaggaacaacatcatcagcacagtgcagccgggcgccttcctgggcctgggggagctgaagcgtttagatctctccaacaaccggattggctgtctcacctccgagaccttccagggcctccccaggcttctccgactaaacatatctggaaacatcttctccagtctgcaacctggggtctttgatgagctgccagcccttaaggttgtggacttgggcaccgagttcctgacctgtgactgccacctgcgctggctgctgccctgggcccagaatcgctccctgcagctgtcggaacacacgctctgtgcttaccccagtgccctgcatgctcaggccctgggcagcctccaggaggcccagctctgctgcgagggggccctggagctgcacacacaccacctcatcccgtccctacgccaagtggtgttccagggggatcggctgcccttccagtgctctgccagctacctgggcaacgacacccgcatccgctggtaccacaaccgagcccctgtggagggtgatgagcaggcgggcatcctcctggccgagagcctcatccacgactgcaccttcatcaccagtgagctgacgctgtctcacatcggcgtgtgggcctcaggcgagtgggagtgcaccgtgtccatggcccaaggcaacgccagcaagaaggtggagatcgtggtgctggagacctctgcctcctactgccccgccgagcgtgttgccaacaaccgcggggacttcaggtggccccgaactctggctggcatcacagcctaccagtcctgcctgcagtatcccttcacctcagtgcccctgggcgggggtgccccgggcacccgagcctcccgccggtgtgaccgtgccggccgctgggagccaggggactactcccactgtctctacaccaacgacatcaccagggtgctgtacaccttcgtgctgatgcccatcaatgcctccaatgcgctgaccctggctcaccagctgcgcgtgtacacagccgaggccgctagcttttcagacatgatggatgtagtctatgtggctcagatgatccagaaatttttgggttatgtcgaccagatcaaagagctggtagaggtgatggtggacatggccagcaacctgatgctggtggacgagcacctgctgtggctggcccagcgcgaggacaaggcctgcagccgcatcgtgggtgccctggagcgcattgggggggccgccctcagcccccatgcccagcacatctcagtgaatgcgaggaacgtggcattggaggcctacctcatcaagccgcacagctacgtgggcctgacctgcacagccttccagaggagggagggaggggtgccgggcacacggccaggaagccctggccagaaccccccacctgagcccgagcccccagctgaccagcagctccgcttccgctgcaccaccgggaggcccaatgtttctctgtcgtccttccacatcaagaacagcgtggccctggcctccatccagctgcccccgagtctattctcatcccttccggctgccctggctcccccggtgcccccagactgcaccctgcaactgctcgtcttccgaaatggccgcctcttccacagccacagcaacacctcccgccctggagctgctgggcctggcaagaggcgtggcgtggccacccccgtcatcttcgcaggaaccagtggctgtggcgtgggaaacctgacagagccagtggccgtttcgctgcggcactgggctgagggagccgaacctgtggccgcttggtggagccaggaggggcccggggaggctgggggctggacctcggagggctgccagctccgctccagccagcccaatgtcagcgccctgcactgccagcacttgggcaatgtggccgtgctcatggagctgagcgcctttcccagggaggtggggggcgccggggcagggctgcaccccgtggtatacccctgcacggccttgctgctgctctgcctcttcgccaccatcatcacctacatcctcaaccacagctccatccgtgtgtcccggaaaggctggcacatgctgctgaacttgtgcttccacatagccatgacctctgctgtctttgcggggggcatcacactcaccaactaccagatggtctgccaggcggtgggcatcaccctgcactactcctccctatccacgctgctctggatgggcgtgaaggcgcgagtgctccataaggagctcacctggagggcaccccctccgcaagaaggggaccccgctctgcctactcccagtcctatgctccggttctatttgatcgctggagggattccactcattatctgtggcatcacagctgcagtcaacatccacaactaccgggaccacagcccctactgctggctggtgtggcgtccaagccttggcgccttctacatccctgtggctttgattctgctcatcacctggatctatttcctgtgcgccgggctacgcttacggggtcctctggcacagaaccccaaggcgggcaacagcagggcctccctggaggcaggggaggagctgaggggttccaccaggctcaggggcagcggccccctcctgagtgactcaggttcccttcttgctactgggagcgcgcgagtggggacgcccgggcccccggaggatggtgacagcctctattctccgggagtccagctaggggcgctggtgaccacgcacttcctgtacttggccatgtgggcctgcggggctctggcagtgtcccagcgctggctgccccgggtggtgtgcagctgcttgtacggggtggcagcctccgccctgggcctcttcgtcttcactcaccactgtgccaggcggagggacgtgagagcctcgtggcgcgcctgctgcccccctgcctctcccgcggccccccatgccccgccccgggccctgcccgccgccgcagaggacggttccccggtgttcggggaggggcccccctccctcaagtcctccccaagcggcagcagcggccatccgctggctctgggcccctgcaagctcaccaacctgcagctggcccagagtcaggtgtgcgaggcgggggcggcggccggcggggaaggagagccggagccggcgggcacccggggaaacctcgcccaccgccaccccaacaacgtgcaccacgggcgtcgggcgcacaagagccgggccaagggacaccgcgcgggggaggcctgcggcaagaaccggctcaaggccctgcgcgggggcgcggcgggggcgctggagctgctgtccagcgagagcggtagtctgcacaacagccccaccgacagctacctgggcagcagccgcaacagcccgggcgccggcctgcagctggaaggcgagcccatgctcacgccgtccgagggcagcgacaccagcgccgcgccgctttctgaggcgggccgggcaggccagcgccgcagcgccagccgcgacagtctcaagggcggcggcgcgctggagaaggagagccatcgccgctcgtacccgctcaacgccgccagcctaaacggcgcccccaaggggggcaagtacgacgacgtcaccctgatgggcgcggaggtagccagcggcggctgcatgaagaccggactctggaagagcgaaactaccgtctaa

SEQ ID NO: 203 - protein, 1278 aa, Homo sapiens
MQAGPTSGESGCPAHNSTLSCLCPLCLFRLLSNNKITGLRNGSFLGLSLLEKLDLRNNIISTVQPGAFLGLGELKRLDLSNNRIGCLTSETFQGLPRLLRLNISGNIFSSLQPGVFDELPALKVVDLGTEFLTCDCHLRWLLPWAQNRSLQLSEHTLCAYPSALHAQALGSLQEAQLCCEGALELHTHHLIPSLRQVVFQGDRLPFQCSASYLGNDTRIRWYHNRAPVEGDEQAGILLAESLIHDCTFITSELTLSHIGVWASGEWECTVSMAQGNASKKVEIVVLETSASYCPAERVANNRGDFRWPRTLAGITAYQSCLQYPFTSVPLGGGAPGTRASRRCDRAGRWEPGDYSHCLYTNDITRVLYTFVLMPINASNALTLAHQLRVYTAEAASFSDMMDVVYVAQMIQKFLGYVDQIKELVEVMVDMASNLMLVDEHLLWLAQREDKACSRIVGALERIGGAALSPHAQHISVNARNVALEAYLIKPHSYVGLTCTAFQRREGGVPGTRPGSPGQNPPPEPEPPADQQLRFRCTTGRPNVSLSSFHIKNSVALASIQLPPSLFSSLPAALAPPVPPDCTLQLLVFRNGRLFHSHSNTSRPGAAGPGKRRGVATPVIFAGTSGCGVGNLTEPVAVSLRHWAEGAEPVAAWWSQEGPGEAGGWTSEGCQLRSSQPNVSALHCQHLGNVAVLMELSAFPREVGGAGAGLHPVVYPCTALLLLCLFATIITYILNHSSIRVSRKGWHMLLNLCFHIAMTSAVFAGGITLTNYQMVCQAVGITLHYSSLSTLLWMGVKARVLHKELTWRAPPPQEGDPALPTPSPMLRFYLIAGGIPLIICGITAAVNIHNYRDHSPYCWLVWRPSLGAFYIPVALILLITWIYFLCAGLRLRGPLAQNPKAGNSRASLEAGEELRGSTRLRGSGPLLSDSGSLLATGSARVGTPGPPEDGDSLYSPGVQLGALVTTHFLYLAMWACGALAVSQRWLPRVVCSCLYGVAASALGLFVFTHHCARRRDVRASWRACCPPASPAAPHAPPRALPAAAEDGSPVFGEGPPSLKSSPSGSSGHPLALGPCKLTNLQLAQSQVCEAGAAAGGEGEPEPAGTRGNLAHRHPNNVHHGRRAHKSRAKGHRAGEACGKNRLKALRGGAAGALELLSSESGSLHNSPTDSYLGSSRNSPGAGLQLEGEPMLTPSEGSDTSAAPLSEAGRAGQRRSASRDSLKGGGALEKESHRRSYPLNAASLNGAPKGGKYDDVTLMGAEVASGGCMKTGLWKSETTV

SEQ ID NO: 204 - DNA, 4068 bp, Homo sapiens
tctccccaccactctcttcgggatattgggtgaagggcttgagcaaggatggaactgtgaagggcatcatgagggggcactgagggtcagccctgtggttccagagtggaaacggggcatcacagggtcacccccacctgctcagcccacctcccacctgcacacagagccccacgtcagagccaggcttggaggagactcagggcaggaaggtctgacgtggggctgggtggaccgttggccagcttctccctgtaatctccggaagtagagggtgggggctgctgcctcgcacaactccagggggcgccattgacaaagatgcaagctggccccaccagtggtgaaagcggatgcccagcacataacagcaccttgtcctgtctgtgtcctctctgtctcttcaggctcttgagcaataacaagatcacggggctccgcaatggctccttcctgggactgtcactgctggagaagctggacctgaggaacaacatcatcagcacagtgcagccgggcgccttcctgggcctgggggagctgaagcgtttagatctctccaacaaccggattggctgtctcacctccgagaccttccagggcctccccaggcttctccgactaaacatatctggaaacatcttctccagtctgcaacctggggtctttgatgagctgccagcccttaaggttgtggacttgggcaccgagttcctgacctgtgactgccacctgcgctggctgctgccctgggcccagaatcgctccctgcagctgtcggaacacacgctctgtgcttaccccagtgccctgcatgctcaggccctgggcagcctccaggaggcccagctctgctgcgagggggccctggagctgcacacacaccacctcatcccgtccctacgccaagtggtgttccagggggatcggctgcccttccagtgctctgccagctacctgggcaacgacacccgcatccgctggtaccacaaccgagcccctgtggagggtgatgagcaggcgggcatcctcctggccgagagcctcatccacgactgcaccttcatcaccagtgagctgacgctgtctcacatcggcgtgtgggcctcaggcgagtgggagtgcaccgtgtccatggcccaaggcaacgccagcaagaaggtggagatcgtggtgctggagacctctgcctcctactgccccgccgagcgtgttgccaacaaccgcggggacttcaggtggccccgaactctggctggcatcacagcctaccagtcctgcctgcagtatcccttcacctcagtgcccctgggcgggggtgccccgggcacccgagcctcccgccggtgtgaccgtgccggccgctgggagccaggggactactcccactgtctctacaccaacgacatcaccagggtgctgtacaccttcgtgctgatgcccatcaatgcctccaatgcgctgaccctggctcaccagctgcgcgtgtacacagccgaggccgctagcttttcagacatgatggatgtagtctatgtggctcagatgatccagaaatttttgggttatgtcgaccagatcaaagagctggtagaggtgatggtggacatggccagcaacctgatgctggtggacgagcacctgctgtggctggcccagcgcgaggacaaggcctgcagccgcatcgtgggtgccctggagcgcattgggggggccgccctcagcccccatgcccagcacatctcagtgaatgcgaggaacgtggcattggaggcctacctcatcaagccgcacagctacgtgggcctgacctgcacagccttccagaggagggagggaggggtgccgggcacacggccaggaagccctggccagaaccccccacctgagcccgagcccccagctgaccagcagctccgcttccgctgcaccaccgggaggcccaatgtttctctgtcgtccttccacatcaagaacagcgtggccctggcctccatccagctgcccccgagtctattctcatcccttccggctgccctggctcccccggtgcccccagactgcaccctgcaactgctcgtcttccgaaatggccgcctcttccacagccacagcaacacctcccgccctggagctgctgggcctggcaagaggcgtggcgtggccacccccgtcatcttcgcaggaaccagtggctgtggcgtgggaaacctgacagagccagtggccgtttcgctgcggcactgggctgagggagccgaacctgtggccgcttggtggagccaggaggggcccggggaggctgggggctggacctcggagggctgccagctccgctccagccagcccaatgtcagcgccctgcactgccagcacttgggcaatgtggccgtgctcatggagctgagcgcctttcccagggaggtggggggcgccggggcagggctgcaccccgtggtatacccctgcacggccttgctgctgctctgcctcttcgccaccatcatcacctacatcctcaaccacagctccatccgtgtgtcccggaaaggctggcacatgctgctgaacttgtgcttccacatagccatgacctctgctgtctttgcggggggcatcacactcaccaactaccagatggtctgccaggcggtgggcatcaccctgcactactcctccctatccacgctgctctggatgggcgtgaaggcgcgagtgctccataaggagctcacctggagggcaccccctccgcaagaaggggaccccgctctgcctactcccagtcctatgctccgctgctggctggtgtggcgtccaagccttggcgccttctacatccctgtggctttgattctgctcatcacctggatctatttcctgtgcgccgggctacgcttacggggtcctctggcacagaaccccaaggcgggcaacagcagggcctccctggaggcaggggaggagctgaggggttccaccaggctcaggggcagcggccccctcctgagtgactcaggttcccttcttgctactgggagcgcgcgagtggggacgcccgggcccccggaggatggtgacagcctctattctccgggagtccagctaggggcgctggtgaccacgcacttcctgtacttggccatgtgggcctgcggggctctggcagtgtcccagcgctggctgccccgggtggtgtgcagctgcttgtacggggtggcagcctccgccctgggcctcttcgtcttcactcaccactgtgccaggcggagggacgtgagagcctcgtggcgcgcctgctgcccccctgcctctcccgcggccccccatgccccgccccgggccctgcccgccgccgcagaggacggttccccggtgttcggggaggggcccccctccctcaagtcctccccaagcggcagcagcggccatccgctggctctgggcccctgcaagctcaccaacctgcagctggcccagagtcaggtgtgcgaggcgggggcggcggccggcggggaaggagagccggagccggcgggcacccggggaaacctcgcccaccgccaccccaacaacgtgcaccacgggcgtcgggcgcacaagagccgggccaagggacaccgcgcgggggaggcctgcggcaagaaccggctcaaggccctgcgcgggggcgcggcgggggcgctggagctgctgtccagcgagagcggtagtctgcacaacagccccaccgacagctacctgggcagcagccgcaacagcccgggcgccggcctgcagctggaaggcgagcccatgctcacgccgtccgagggcagcgacaccagcgccgcgccgctttctgaggcgggccgggcaggccagcgccgcagcgccagccgcgacagtctcaagggcggcggcgcgctggagaaggagagccatcgccgctcgtacccgctcaacgccgccagcctaaacggcgcccccaaggggggcaagtacgacgacgtcaccctgatgggcgcggaggtagccagcggcggctgcatgaagaccggactctggaagagcgaaactaccgtctaa

SEQ ID NO: 205 - DNA, 2673 bp, Homo sapiens
  CDS (1)...(2673)
atggcaagggttttgctaaacaaatcctctgcccgctccccgccccgggctcactccatgttaggccccagtcggggcagccacctgccgtgcctgttggaagttgcctctgccatgctgggccctgctgtcctgggcctcagcctctgggctctcctgcaccctgggacgggggccccattgtgcctgtcacagcaacttaggatgaagggggactacgtgctgggggggctgttccccctgggcgaggccgaggaggctggcctccgcagccggacacggcccagcagccctgtgtgcaccaggttctcctcaaacggcctgctctgggcactggccatgaaaatggccgtggaggagatcaacaacaagtcggatctgctgcccgggctgcgcctgggctacgacctctttgatacgtgctcggagcctgtggtggccatgaagcccagcctcatgttcctggccaaggcaggcagccgcgacatcgccgcctactgcaactacacgcagtaccagccccgtgtgctggctgtcatcgggccccactcgtcagagctcgccatggtcaccggcaagttcttcagcttcttcctcatgccccaggtcagctacggtgctagcatggagctgctgagcgcccgggagaccttcccctccttcttccgcaccgtgcccagcgaccgtgtgcagctgacggccgccgcggagctgctgcaggagttcggctggaactgggtggccgccctgggcagcgacgacgagtacggccggcagggcctgagcatcttctcggccctggccgcggcacgcggcatctgcatcgcgcacgagggcctggtgccgctgccccgtgccgatgactcgcggctggggaaggtgcaggacgtcctgcaccaggtgaaccagagcagcgtgcaggtggtgctgctgttcgcctccgtgcacgccgcccacgccctcttcaactacagcatcagcagcaggctctcgcccaaggtgtgggtggccagcgaggcctggctgacctctgacctggtcatggggctgcccggcatggcccagatgggcacggtgcttggcttcctccagaggggtgcccagctgcacgagttcccccagtacgtgaagacgcacctggccctggccaccgacccggccttctgctctgccctgggcgagagggagcagggtctggaggaggacgtggtgggccagcgctgcccgcagtgtgactgcatcacgctgcagaacgtgagcgcagggctaaatcaccaccagacgttctctgtctacgcagctgtgtatagcgtggcccaggccctgcacaacactcttcagtgcaacgcctcaggctgccccgcgcaggaccccgtgaagccctggcagctcctggagaacatgtacaacctgaccttccacgtgggcgggctgccgctgcggttcgacagcagcggaaacgtggacatggagtacgacctgaagctgtgggtgtggcagggctcagtgcccaggctccacgacgtgggcaggttcaacggcagcctcaggacagagcgcctgaagatccgctggcacacgtctgacaaccagaagcccgtgtcccggtgctcgcggcagtgccaggagggccaggtgcgccgggtcaaggggttccactcctgctgctacgactgtgtggactgcgaggcgggcagctaccggcaaaacccagacgacatcgcctgcaccttttgtggccaggatgagtggtccccggagcgaagcacacgctgcttccgccgcaggtctcggttcctggcatggggcgagccggctgtgctgctgctgctcctgctgctgagcctggcgctgggccttgtgctggctgctttggggctgttcgttcaccatcgggacagcccactggttcaggcctcgggggggcccctggcctgctttggcctggtgtgcctgggcctggtctgcctcagcgtcctcctgttccctggccagcccagccctgcccgatgcctggcccagcagcccttgtcccacctcccgctcacgggctgcctgagcacactcttcctgcaggcggccgagatcttcgtggagtcagaactgcctctgagctgggcagaccggctgagtggctgcctgcgggggccctgggcctggctggtggtgctgctggccatgctggtggaggtcgcactgtgcacctggtacctggtggccttcccgccggaggtggtgacggactggcacatgctgcccacggaggcgctggtgcactgccgcacacgctcctgggtcagcttcggcctagcgcacgccaccaatgccacgctggcctttctctgcttcctgggcactttcctggtgcggagccagccgggccgctacaaccgtgcccgtggcctcacctttgccatgctggcctacttcatcacctgggtctcctttgtgcccctcctggccaatgtgcaggtggtcctcaggcccgccgtgcagatgggcgccctcctgctctgtgtcctgggcatcctggctgccttccacctgcccaggtgttacctgctcatgcggcagccagggctcaacacccccgagttcttcctgggagggggccctggggatgcccaaggccagaatgacgggaacacaggaaatcaggggaaacatgagtga

SEQ ID NO: 206 - protein, 890 aa, Homo sapiens
MARVLLNKSSARSPPRAHSMLGPSRGSHLPCLLEVASAMLGPAVLGLSLWALLHPGTGAPLCLSQQLRMKGDYVLGGLFPLGEAEEAGLRSRTRPSSPVCTRFSSNGLLWALAMKMAVEEINNKSDLLPGLRLGYDLFDTCSEPVVAMKPSLMFLAKAGSRDIAAYCNYTQYQPRVLAVIGPHSSELAMVTGKFFSFFLMPQVSYGASMELLSARETFPSFFRTVPSDRVQLTAAAELLQEFGWNWVAALGSDDEYGRQGLSIFSALAAARGICIAHEGLVPLPRADDSRLGKVQDVLHQVNQSSVQVVLLFASVHAAHALFNYSISSRLSPKVWVASEAWLTSDLVMGLPGMAQMGTVLGFLQRGAQLHEFPQYVKTHLALATDPAFCSALGEREQGLEEDVVGQRCPQCDCITLQNVSAGLNHHQTFSVYAAVYSVAQALHNTLQCNASGCPAQDPVKPWQLLENMYNLTFHVGGLPLRFDSSGNVDMEYDLKLWVWQGSVPRLHDVGRFNGSLRTERLKIRWHTSDNQKPVSRCSRQCQEGQVRRVKGFHSCCYDCVDCEAGSYRQNPDDIACTFCGQDEWSPERSTRCFRRRSRFLAWGEPAVLLLLLLLSLALGLVLAALGLFVHHRDSPLVQASGGPLACFGLVCLGLVCLSVLLFPGQPSPARCLAQQPLSHLPLTGCLSTLFLQAAEIFVESELPLSWADRLSGCLRGPWAWLVVLLAMLVEVALCTWYLVAFPPEVVTDWHMLPTEALVHCRTRSWVSFGLAHATNATLAFLCFLGTFLVRSQPGRYNRARGLTFAMLAYFITWVSFVPLLANVQVVLRPAVQMGALLLCVLGILAAFHLPRCYLLMRQPGLNTPEFFLGGGPGDAQGQNDGNTGNQGKHE

SEQ ID NO: 207 - DNA, 2697 bp, Homo sapiens
  CDS (1)...(2697)
atggcaagggttttgctaaacaaatcctctgcccgctccccgccccgggctcactccatgttaggccccagtcggggcagccacctgccgtgcctgttggaagttgcctctgccatgctgggccctgctgtcctgggcctcagcctctgggctctcctgcaccctgggacgggggccccattgtgcctgtcacagcaacttaggatgaagggggactacgtgctgggggggctgttccccctgggcgaggccgaggaggctggcctccgcagccggacacggcccagcagccctgtgtgcaccaggttctcctcaaacggcctgctctgggcactggccatgaaaatggccgtggaggagatcaacaacaagtcggatctgctgcccgggctgcgcctgggctacgacctctttgatacgtgctcggagcctgtggtggccatgaagcccagcctcatgttcctggccaaggcaggcagccgcgacatcgccgcctactgcaactacacgcagtaccagccccgtgtgctggctgtcatcgggccccactcgtcagagctcgccatggtcaccggcaagttcttcagcttcttcctcatgccccaggtcagctacggtgctagcatggagctgctgagcgcccgggagaccttcccctccttcttccgcaccgtgcccagcgaccgtgtgcagctgacggccgccgcggagctgctgcaggagttcggctggaactgggtggccgccctgggcagcgacgacgagtacggccggcagggcctgagcatcttctcggccctggccgcggcacgcggcatctgcatcgcgcacgagggcctggtgccgctgccccgtgccgatgactcgcggctggggaaggtgcaggacgtcctgcaccaggtgaaccagagcagcgtgcaggtggtgctgctgttcgcctccgtgcacgccgcccacgccctcttcaactacagcatcagcagcaggctctcgcccaaggtgtgggtggccagcgaggcctggctgacctctgacctggtcatggggctgcccggcatggcccagatgggcacggtgcttggcttcctccagaggggtgcccagctgcacgagttcccccagtacgtgaagacgcacctggccctggccaccgacccggccttctgctctgccctgggcgagagggagcagggtctggaggaggacgtggtgggccagcgctgcccgcagtgtgactgcatcacgctgcagaacgtgagcgcagggctaaatcaccaccagacgttctctgtctacgcagctgtgtatagcgtggcccaggccctgcacaacactcttcagtgcaacgcctcaggctgccccgcgcaggaccccgtgaagccctggcagctcctggagaacatgtacaacctgaccttccacgtgggcgggctgccgctgcggttcgacagcagcggaaacgtggacatggagtacgacctgaagctgtgggtgtggcagggctcagtgcccaggctccacgacgtgggcaggttcaacggcagcctcaggacagagcgcctgaagatccgctggcacacgtctgacaaccagaagcccgtgtcccggtgctcgcggcagtgccaggagggccaggtgcgccgggtcaaggggttccactcctgctgctacgactgtgtggactgcgaggcgggcagctaccggcaaaaccccccagcgcccttctcctctctcacagacgacatcgcctgcaccttttgtggccaggatgagtggtccccggagcgaagcacacgctgcttccgccgcaggtctcggttcctggcatggggcgagccggctgtgctgctgctgctcctgctgctgagcctggcgctgggccttgtgctggctgctttggggctgttcgttcaccatcgggacagcccactggttcaggcctcgggggggcccctggcctgctttggcctggtgtgcctgggcctggtctgcctcagcgtcctcctgttccctggccagcccagccctgcccgatgcctggcccagcagcccttgtcccacctcccgctcacgggctgcctgagcacactcttcctgcaggcggccgagatcttcgtggagtcagaactgcctctgagctgggcagaccggctgagtggctgcctgcgggggccctgggcctggctggtggtgctgctggccatgctggtggaggtcgcactgtgcacctggtacctggtggccttcccgccggaggtggtgacggactggcacatgctgcccacggaggcgctggtgcactgccgcacacgctcctgggtcagcttcggcctagcgcacgccaccaatgccacgctggcctttctctgcttcctgggcactttcctggtgcggagccagccgggccgctacaaccgtgcccgtggcctcacctttgccatgctggcctacttcatcacctgggtctcctttgtgcccctcctggccaatgtgcaggtggtcctcaggcccgccgtgcagatgggcgccctcctgctctgtgtcctgggcatcctggctgccttccacctgcccaggtgttacctgctcatgcggcagccagggctcaacacccccgagttcttcctgggagggggccctggggatgcccaaggccagaatgacgggaacacaggaaatcaggggaaacatgagtga

SEQ ID NO: 208 - protein, 898 aa, Homo sapiens
MARVLLNKSSARSPPRAHSMLGPSRGSHLPCLLEVASAMLGPAVLGLSLWALLHPGTGAPLCLSQQLRMKGDYVLGGLFPLGEAEEAGLRSRTRPSSPVCTRFSSNGLLWALAMKMAVEEINNKSDLLPGLRLGYDLFDTCSEPVVAMKPSLMFLAKAGSRDIAAYCNYTQYQPRVLAVIGPHSSELAMVTGKFFSFFLMPQVSYGASMELLSARETFPSFFRTVPSDRVQLTAAAELLQEFGWNWVAALGSDDEYGRQGLSIFSALAAARGICIAHEGLVPLPRADDSRLGKVQDVLHQVNQSSVQVVLLFASVHAAHALFNYSISSRLSPKVWVASEAWLTSDLVMGLPGMAQMGTVLGFLQRGAQLHEFPQYVKTHLALATDPAFCSALGEREQGLEEDVVGQRCPQCDCITLQNVSAGLNHHQTFSVYAAVYSVAQALHNTLQCNASGCPAQDPVKPWQLLENMYNLTFHVGGLPLRFDSSGNVDMEYDLKLWVWQGSVPRLHDVGRFNGSLRTERLKIRWHTSDNQKPVSRCSRQCQEGQVRRVKGFHSCCYDCVDCEAGSYRQNPPAPFSSLTDDIACTFCGQDEWSPERSTRCFRRRSRFLAWGEPAVLLLLLLLSLALGLVLAALGLFVHHRDSPLVQASGGPLACFGLVCLGLVCLSVLLFPGQPSPARCLAQQPLSHLPLTGCLSTLFLQAAEIFVESELPLSWADRLSGCLRGPWAWLVVLLAMLVEVALCTWYLVAFPPEVVTDWHMLPTEALVHCRTRSWVSFGLAHATNATLAFLCFLGTFLVRSQPGRYNRARGLTFAMLAYFITWVSFVPLLANVQVVLRPAVQMGALLLCVLGILAAFHLPRCYLLMRQPGLNTPEFFLGGGPGDAQGQNDGNTGNQGKHE

SEQ ID NO: 209 - DNA, 2334 bp, Homo sapiens
  CDS (1)...(2334)
atgaaaatggccgtggaggagatcaacaacaagtcggatctgctgcccgggctgcgcctgggctacgacctctttgatacgtgctcggagcctgtggtggccatgaagcccagcctcatgttcctggccaaggcaggcagccgcgacatcgccgcctactgcaactacacgcagtaccagccccgtgtgctggctgtcatcgggccccactcgtcagagctcgccatggtcaccggcaagttcttcagcttcttcctcatgccccaggtcagctacggtgctagcatggagctgctgagcgcccgggagaccttcccctccttcttccgcaccgtgcccagcgaccgtgtgcagctgacggccgccgcggagctgctgcaggagttcggctggaactgggtggccgccctgggcagcgacgacgagtacggccggcagggcctgagcatcttctcggccctggccgcggcacgcggcatctgcatcgcgcacgagggcctggtgccgctgccccgtgccgatgactcgcggctggggaaggtgcaggacgtcctgcaccaggtgaaccagagcagcgtgcaggtggtgctgctgttcgcctccgtgcacgccgcccacgccctcttcaactacagcatcagcagcaggctctcgcccaaggtgtgggtggccagcgaggcctggctgacctctgacctggtcatggggctgcccggcatggcccagatgggcacggtgcttggcttcctccagaggggtgcccagctgcacgagttcccccagtacgtgaagacgcacctggccctggccaccgacccggccttctgctctgccctgggcgagagggagcagggtctggaggaggacgtggtgggccagcgctgcccgcagtgtgactgcatcacgctgcagaacgtgagcgcagggctaaatcaccaccagacgttctctgtctacgcagctgtgtatagcgtggcccaggccctgcacaacactcttcagtgcaacgcctcaggctgccccgcgcaggaccccgtgaagccctggcagctcctggagaacatgtacaacctgaccttccacgtgggcgggctgccgctgcggttcgacagcagcggaaacgtggacatggagtacgacctgaagctgtgggtgtggcagggctcagtgcccaggctccacgacgtgggcaggttcaacggcagcctcaggacagagcgcctgaagatccgctggcacacgtctgacaaccagaagcccgtgtcccggtgctcgcggcagtgccaggagggccaggtgcgccgggtcaaggggttccactcctgctgctacgactgtgtggactgcgaggcgggcagctaccggcaaaacccagacgacatcgcctgcaccttttgtggccaggatgagtggtccccggagcgaagcacacgctgcttccgccgcaggtctcggttcctggcatggggcgagccggctgtgctgctgctgctcctgctgctgagcctggcgctgggccttgtgctggctgctttggggctgttcgttcaccatcgggacagcccactggttcaggcctcgggggggcccctggcctgctttggcctggtgtgcctgggcctggtctgcctcagcgtcctcctgttccctggccagcccagccctgcccgatgcctggcccagcagcccttgtcccacctcccgctcacgggctgcctgagcacactcttcctgcaggcggccgagatcttcgtggagtcagaactgcctctgagctgggcagaccggctgagtggctgcctgcgggggccctgggcctggctggtggtgctgctggccatgctggtggaggtcgcactgtgcacctggtacctggtggccttcccgccggaggtggtgacggactggcacatgctgcccacggaggcgctggtgcactgccgcacacgctcctgggtcagcttcggcctagcgcacgccaccaatgccacgctggcctttctctgcttcctgggcactttcctggtgcggagccagccgggccgctacaaccgtgcccgtggcctcacctttgccatgctggcctacttcatcacctgggtctcctttgtgcccctcctggccaatgtgcaggtggtcctcaggcccgccgtgcagatgggcgccctcctgctctgtgtcctgggcatcctggctgccttccacctgcccaggtgttacctgctcatgcggcagccagggctcaacacccccgagttcttcctgggagggggccctggggatgcccaaggccagaatgacgggaacacaggaaatcaggggaaacatgagtga

SEQ ID NO: 210 - protein, 777 aa, Homo sapiens
MKMAVEEINNKSDLLPGLRLGYDLFDTCSEPVVAMKPSLMFLAKAGSRDIAAYCNYTQYQPRVLAVIGPHSSELAMVTGKFFSFFLMPQVSYGASMELLSARETFPSFFRTVPSDRVQLTAAAELLQEFGWNWVAALGSDDEYGRQGLSIFSALAAARGICIAHEGLVPLPRADDSRLGKVQDVLHQVNQSSVQVVLLFASVHAAHALFNYSISSRLSPKVWVASEAWLTSDLVMGLPGMAQMGTVLGFLQRGAQLHEFPQYVKTHLALATDPAFCSALGEREQGLEEDVVGQRCPQCDCITLQNVSAGLNHHQTFSVYAAVYSVAQALHNTLQCNASGCPAQDPVKPWQLLENMYNLTFHVGGLPLRFDSSGNVDMEYDLKLWVWQGSVPRLHDVGRFNGSLRTERLKIRWHTSDNQKPVSRCSRQCQEGQVRRVKGFHSCCYDCVDCEAGSYRQNPDDIACTFCGQDEWSPERSTRCFRRRSRFLAWGEPAVLLLLLLLSLALGLVLAALGLFVHHRDSPLVQASGGPLACFGLVCLGLVCLSVLLFPGQPSPARCLAQQPLSHLPLTGCLSTLFLQAAEIFVESELPLSWADRLSGCLRGPWAWLVVLLAMLVEVALCTWYLVAFPPEVVTDWHMLPTEALVHCRTRSWVSFGLAHATNATLAFLCFLGTFLVRSQPGRYNRARGLTFAMLAYFITWVSFVPLLANVQVVLRPAVQMGALLLCVLGILAAFHLPRCYLLMRQPGLNTPEFFLGGGPGDAQGQNDGNTGNQGKHE

SEQ ID NO: 211 - DNA, 2328 bp, Homo sapiens
  CDS (1)...(2328)
atggccgtggaggagatcaacaacaagtcggatctgctgcccgggctgcgcctgggctacgacctctttgatacgtgctcggagcctgtggtggccatgaagcccagcctcatgttcctggccaaggcaggcagccgcgacatcgccgcctactgcaactacacgcagtaccagccccgtgtgctggctgtcatcgggccccactcgtcagagctcgccatggtcaccggcaagttcttcagcttcttcctcatgccccaggtcagctacggtgctagcatggagctgctgagcgcccgggagaccttcccctccttcttccgcaccgtgcccagcgaccgtgtgcagctgacggccgccgcggagctgctgcaggagttcggctggaactgggtggccgccctgggcagcgacgacgagtacggccggcagggcctgagcatcttctcggccctggccgcggcacgcggcatctgcatcgcgcacgagggcctggtgccgctgccccgtgccgatgactcgcggctggggaaggtgcaggacgtcctgcaccaggtgaaccagagcagcgtgcaggtggtgctgctgttcgcctccgtgcacgccgcccacgccctcttcaactacagcatcagcagcaggctctcgcccaaggtgtgggtggccagcgaggcctggctgacctctgacctggtcatggggctgcccggcatggcccagatgggcacggtgcttggcttcctccagaggggtgcccagctgcacgagttcccccagtacgtgaagacgcacctggccctggccaccgacccggccttctgctctgccctgggcgagagggagcagggtctggaggaggacgtggtgggccagcgctgcccgcagtgtgactgcatcacgctgcagaacgtgagcgcagggctaaatcaccaccagacgttctctgtctacgcagctgtgtatagcgtggcccaggccctgcacaacactcttcagtgcaacgcctcaggctgccccgcgcaggaccccgtgaagccctggcagctcctggagaacatgtacaacctgaccttccacgtgggcgggctgccgctgcggttcgacagcagcggaaacgtggacatggagtacgacctgaagctgtgggtgtggcagggctcagtgcccaggctccacgacgtgggcaggttcaacggcagcctcaggacagagcgcctgaagatccgctggcacacgtctgacaaccagaagcccgtgtcccggtgctcgcggcagtgccaggagggccaggtgcgccgggtcaaggggttccactcctgctgctacgactgtgtggactgcgaggcgggcagctaccggcaaaacccagacgacatcgcctgcaccttttgtggccaggatgagtggtccccggagcgaagcacacgctgcttccgccgcaggtctcggttcctggcatggggcgagccggctgtgctgctgctgctcctgctgctgagcctggcgctgggccttgtgctggctgctttggggctgttcgttcaccatcgggacagcccactggttcaggcctcgggggggcccctggcctgctttggcctggtgtgcctgggcctggtctgcctcagcgtcctcctgttccctggccagcccagccctgcccgatgcctggcccagcagcccttgtcccacctcccgctcacgggctgcctgagcacactcttcctgcaggcggccgagatcttcgtggagtcagaactgcctctgagctgggcagaccggctgagtggctgcctgcgggggccctgggcctggctggtggtgctgctggccatgctggtggaggtcgcactgtgcacctggtacctggtggccttcccgccggaggtggtgacggactggcacatgctgcccacggaggcgctggtgcactgccgcacacgctcctgggtcagcttcggcctagcgcacgccaccaatgccacgctggcctttctctgcttcctgggcactttcctggtgcggagccagccgggccgctacaaccgtgcccgtggcctcacctttgccatgctggcctacttcatcacctgggtctcctttgtgcccctcctggccaatgtgcaggtggtcctcaggcccgccgtgcagatgggcgccctcctgctctgtgtcctgggcatcctggctgccttccacctgcccaggtgttacctgctcatgcggcagccagggctcaacacccccgagttcttcctgggagggggccctggggatgcccaaggccagaatgacgggaacacaggaaatcaggggaaacatgagtga

SEQ ID NO: 212 - protein, 775 aa, Homo sapiens
MAVEEINNKSDLLPGLRLGYDLFDTCSEPVVAMKPSLMFLAKAGSRDIAAYCNYTQYQPRVLAVIGPHSSELAMVTGKFFSFFLMPQVSYGASMELLSARETFPSFFRTVPSDRVQLTAAAELLQEFGWNWVAALGSDDEYGRQGLSIFSALAAARGICIAHEGLVPLPRADDSRLGKVQDVLHQVNQSSVQVVLLFASVHAAHALFNYSISSRLSPKVWVASEAWLTSDLVMGLPGMAQMGTVLGFLQRGAQLHEFPQYVKTHLALATDPAFCSALGEREQGLEEDVVGQRCPQCDCITLQNVSAGLNHHQTFSVYAAVYSVAQALHNTLQCNASGCPAQDPVKPWQLLENMYNLTFHVGGLPLRFDSSGNVDMEYDLKLWVWQGSVPRLHDVGRFNGSLRTERLKIRWHTSDNQKPVSRCSRQCQEGQVRRVKGFHSCCYDCVDCEAGSYRQNPDDIACTFCGQDEWSPERSTRCFRRRSRFLAWGEPAVLLLLLLLSLALGLVLAALGLFVHHRDSPLVQASGGPLACFGLVCLGLVCLSVLLFPGQPSPARCLAQQPLSHLPLTGCLSTLFLQAAEIFVESELPLSWADRLSGCLRGPWAWLVVLLAMLVEVALCTWYLVAFPPEVVTDWHMLPTEALVHCRTRSWVSFGLAHATNATLAFLCFLGTFLVRSQPGRYNRARGLTFAMLAYFITWVSFVPLLANVQVVLRPAVQMGALLLCVLGILAAFHLPRCYLLMRQPGLNTPEFFLGGGPGDAQGQNDGNTGNQGKHE

SEQ ID NO: 213 - DNA, 2358 bp, Homo sapiens
  CDS (1)...(2358)
atgaaaatggccgtggaggagatcaacaacaagtcggatctgctgcccgggctgcgcctgggctacgacctctttgatacgtgctcggagcctgtggtggccatgaagcccagcctcatgttcctggccaaggcaggcagccgcgacatcgccgcctactgcaactacacgcagtaccagccccgtgtgctggctgtcatcgggccccactcgtcagagctcgccatggtcaccggcaagttcttcagcttcttcctcatgccccaggtcagctacggtgctagcatggagctgctgagcgcccgggagaccttcccctccttcttccgcaccgtgcccagcgaccgtgtgcagctgacggccgccgcggagctgctgcaggagttcggctggaactgggtggccgccctgggcagcgacgacgagtacggccggcagggcctgagcatcttctcggccctggccgcggcacgcggcatctgcatcgcgcacgagggcctggtgccgctgccccgtgccgatgactcgcggctggggaaggtgcaggacgtcctgcaccaggtgaaccagagcagcgtgcaggtggtgctgctgttcgcctccgtgcacgccgcccacgccctcttcaactacagcatcagcagcaggctctcgcccaaggtgtgggtggccagcgaggcctggctgacctctgacctggtcatggggctgcccggcatggcccagatgggcacggtgcttggcttcctccagaggggtgcccagctgcacgagttcccccagtacgtgaagacgcacctggccctggccaccgacccggccttctgctctgccctgggcgagagggagcagggtctggaggaggacgtggtgggccagcgctgcccgcagtgtgactgcatcacgctgcagaacgtgagcgcagggctaaatcaccaccagacgttctctgtctacgcagctgtgtatagcgtggcccaggccctgcacaacactcttcagtgcaacgcctcaggctgccccgcgcaggaccccgtgaagccctggcagctcctggagaacatgtacaacctgaccttccacgtgggcgggctgccgctgcggttcgacagcagcggaaacgtggacatggagtacgacctgaagctgtgggtgtggcagggctcagtgcccaggctccacgacgtgggcaggttcaacggcagcctcaggacagagcgcctgaagatccgctggcacacgtctgacaaccagaagcccgtgtcccggtgctcgcggcagtgccaggagggccaggtgcgccgggtcaaggggttccactcctgctgctacgactgtgtggactgcgaggcgggcagctaccggcaaaaccccccagcgcccttctcctctctcacagacgacatcgcctgcaccttttgtggccaggatgagtggtccccggagcgaagcacacgctgcttccgccgcaggtctcggttcctggcatggggcgagccggctgtgctgctgctgctcctgctgctgagcctggcgctgggccttgtgctggctgctttggggctgttcgttcaccatcgggacagcccactggttcaggcctcgggggggcccctggcctgctttggcctggtgtgcctgggcctggtctgcctcagcgtcctcctgttccctggccagcccagccctgcccgatgcctggcccagcagcccttgtcccacctcccgctcacgggctgcctgagcacactcttcctgcaggcggccgagatcttcgtggagtcagaactgcctctgagctgggcagaccggctgagtggctgcctgcgggggccctgggcctggctggtggtgctgctggccatgctggtggaggtcgcactgtgcacctggtacctggtggccttcccgccggaggtggtgacggactggcacatgctgcccacggaggcgctggtgcactgccgcacacgctcctgggtcagcttcggcctagcgcacgccaccaatgccacgctggcctttctctgcttcctgggcactttcctggtgcggagccagccgggccgctacaaccgtgcccgtggcctcacctttgccatgctggcctacttcatcacctgggtctcctttgtgcccctcctggccaatgtgcaggtggtcctcaggcccgccgtgcagatgggcgccctcctgctctgtgtcctgggcatcctggctgccttccacctgcccaggtgttacctgctcatgcggcagccagggctcaacacccccgagttcttcctgggagggggccctggggatgcccaaggccagaatgacgggaacacaggaaatcaggggaaacatgagtga

SEQ ID NO: 214 - protein, 785 aa, Homo sapiens
MKMAVEEINNKSDLLPGLRLGYDLFDTCSEPVVAMKPSLMFLAKAGSRDIAAYCNYTQYQPRVLAVIGPHSSELAMVTGKFFSFFLMPQVSYGASMELLSARETFPSFFRTVPSDRVQLTAAAELLQEFGWNWVAALGSDDEYGRQGLSIFSALAAARGICIAHEGLVPLPRADDSRLGKVQDVLHQVNQSSVQVVLLFASVHAAHALFNYSISSRLSPKVWVASEAWLTSDLVMGLPGMAQMGTVLGFLQRGAQLHEFPQYVKTHLALATDPAFCSALGEREQGLEEDVVGQRCPQCDCITLQNVSAGLNHHQTFSVYAAVYSVAQALHNTLQCNASGCPAQDPVKPWQLLENMYNLTFHVGGLPLRFDSSGNVDMEYDLKLWVWQGSVPRLHDVGRFNGSLRTERLKIRWHTSDNQKPVSRCSRQCQEGQVRRVKGFHSCCYDCVDCEAGSYRQNPPAPFSSLTDDIACTFCGQDEWSPERSTRCFRRRSRFLAWGEPAVLLLLLLLSLALGLVLAALGLFVHHRDSPLVQASGGPLACFGLVCLGLVCLSVLLFPGQPSPARCLAQQPLSHLPLTGCLSTLFLQAAEIFVESELPLSWADRLSGCLRGPWAWLVVLLAMLVEVALCTWYLVAFPPEVVTDWHMLPTEALVHCRTRSWVSFGLAHATNATLAFLCFLGTFLVRSQPGRYNRARGLTFAMLAYFITWVSFVPLLANVQVVLRPAVQMGALLLCVLGILAAFHLPRCYLLMRQPGLNTPEFFLGGGPGDAQGQNDGNTGNQGKHE

SEQ ID NO: 215 - DNA, 2352 bp, Homo sapiens
  CDS (1)...(2352)
atggccgtggaggagatcaacaacaagtcggatctgctgcccgggctgcgcctgggctacgacctctttgatacgtgctcggagcctgtggtggccatgaagcccagcctcatgttcctggccaaggcaggcagccgcgacatcgccgcctactgcaactacacgcagtaccagccccgtgtgctggctgtcatcgggccccactcgtcagagctcgccatggtcaccggcaagttcttcagcttcttcctcatgccccaggtcagctacggtgctagcatggagctgctgagcgcccgggagaccttcccctccttcttccgcaccgtgcccagcgaccgtgtgcagctgacggccgccgcggagctgctgcaggagttcggctggaactgggtggccgccctgggcagcgacgacgagtacggccggcagggcctgagcatcttctcggccctggccgcggcacgcggcatctgcatcgcgcacgagggcctggtgccgctgccccgtgccgatgactcgcggctggggaaggtgcaggacgtcctgcaccaggtgaaccagagcagcgtgcaggtggtgctgctgttcgcctccgtgcacgccgcccacgccctcttcaactacagcatcagcagcaggctctcgcccaaggtgtgggtggccagcgaggcctggctgacctctgacctggtcatggggctgcccggcatggcccagatgggcacggtgcttggcttcctccagaggggtgcccagctgcacgagttcccccagtacgtgaagacgcacctggccctggccaccgacccggccttctgctctgccctgggcgagagggagcagggtctggaggaggacgtggtgggccagcgctgcccgcagtgtgactgcatcacgctgcagaacgtgagcgcagggctaaatcaccaccagacgttctctgtctacgcagctgtgtatagcgtggcccaggccctgcacaacactcttcagtgcaacgcctcaggctgccccgcgcaggaccccgtgaagccctggcagctcctggagaacatgtacaacctgaccttccacgtgggcgggctgccgctgcggttcgacagcagcggaaacgtggacatggagtacgacctgaagctgtgggtgtggcagggctcagtgcccaggctccacgacgtgggcaggttcaacggcagcctcaggacagagcgcctgaagatccgctggcacacgtctgacaaccagaagcccgtgtcccggtgctcgcggcagtgccaggagggccaggtgcgccgggtcaaggggttccactcctgctgctacgactgtgtggactgcgaggcgggcagctaccggcaaaaccccccagcgcccttctcctctctcacagacgacatcgcctgcaccttttgtggccaggatgagtggtccccggagcgaagcacacgctgcttccgccgcaggtctcggttcctggcatggggcgagccggctgtgctgctgctgctcctgctgctgagcctggcgctgggccttgtgctggctgctttggggctgttcgttcaccatcgggacagcccactggttcaggcctcgggggggcccctggcctgctttggcctggtgtgcctgggcctggtctgcctcagcgtcctcctgttccctggccagcccagccctgcccgatgcctggcccagcagcccttgtcccacctcccgctcacgggctgcctgagcacactcttcctgcaggcggccgagatcttcgtggagtcagaactgcctctgagctgggcagaccggctgagtggctgcctgcgggggccctgggcctggctggtggtgctgctggccatgctggtggaggtcgcactgtgcacctggtacctggtggccttcccgccggaggtggtgacggactggcacatgctgcccacggaggcgctggtgcactgccgcacacgctcctgggtcagcttcggcctagcgcacgccaccaatgccacgctggcctttctctgcttcctgggcactttcctggtgcggagccagccgggccgctacaaccgtgcccgtggcctcacctttgccatgctggcctacttcatcacctgggtctcctttgtgcccctcctggccaatgtgcaggtggtcctcaggcccgccgtgcagatgggcgccctcctgctctgtgtcctgggcatcctggctgccttccacctgcccaggtgttacctgctcatgcggcagccagggctcaacacccccgagttcttcctgggagggggccctggggatgcccaaggccagaatgacgggaacacaggaaatcaggggaaacatgagtga

SEQ ID NO: 216 - protein, 783 aa, Homo sapiens
MAVEEINNKSDLLPGLRLGYDLFDTCSEPVVAMKPSLMFLAKAGSRDIAAYCNYTQYQPRVLAVIGPHSSELAMVTGKFFSFFLMPQVSYGASMELLSARETFPSFFRTVPSDRVQLTAAAELLQEFGWNWVAALGSDDEYGRQGLSIFSALAAARGICIAHEGLVPLPRADDSRLGKVQDVLHQVNQSSVQVVLLFASVHAAHALFNYSISSRLSPKVWVASEAWLTSDLVMGLPGMAQMGTVLGFLQRGAQLHEFPQYVKTHLALATDPAFCSALGEREQGLEEDVVGQRCPQCDCITLQNVSAGLNHHQTFSVYAAVYSVAQALHNTLQCNASGCPAQDPVKPWQLLENMYNLTFHVGGLPLRFDSSGNVDMEYDLKLWVWQGSVPRLHDVGRFNGSLRTERLKIRWHTSDNQKPVSRCSRQCQEGQVRRVKGFHSCCYDCVDCEAGSYRQNPPAPFSSLTDDIACTFCGQDEWSPERSTRCFRRRSRFLAWGEPAVLLLLLLLSLALGLVLAALGLFVHHRDSPLVQASGGPLACFGLVCLGLVCLSVLLFPGQPSPARCLAQQPLSHLPLTGCLSTLFLQAAEIFVESELPLSWADRLSGCLRGPWAWLVVLLAMLVEVALCTWYLVAFPPEVVTDWHMLPTEALVHCRTRSWVSFGLAHATNATLAFLCFLGTFLVRSQPGRYNRARGLTFAMLAYFITWVSFVPLLANVQVVLRPAVQMGALLLCVLGILAAFHLPRCYLLMRQPGLNTPEFFLGGGPGDAQGQNDGNTGNQGKHE

SEQ ID NO: 217 - DNA, 2559 bp, Homo sapiens
  CDS (1)...(2559)
atgctgggccctgctgtcctgggcctcagcctctgggctctcctgcaccctgggacgggggccccattgtgcctgtcacagcaacttaggatgaagggggactacgtgctgggggggctgttccccctgggcgaggccgaggaggctggcctccgcagccggacacggcccagcagccctgtgtgcaccaggttctcctcaaacggcctgctctgggcactggccatgaaaatggccgtggaggagatcaacaacaagtcggatctgctgcccgggctgcgcctgggctacgacctctttgatacgtgctcggagcctgtggtggccatgaagcccagcctcatgttcctggccaaggcaggcagccgcgacatcgccgcctactgcaactacacgcagtaccagccccgtgtgctggctgtcatcgggccccactcgtcagagctcgccatggtcaccggcaagttcttcagcttcttcctcatgccccaggtcagctacggtgctagcatggagctgctgagcgcccgggagaccttcccctccttcttccgcaccgtgcccagcgaccgtgtgcagctgacggccgccgcggagctgctgcaggagttcggctggaactgggtggccgccctgggcagcgacgacgagtacggccggcagggcctgagcatcttctcggccctggccgcggcacgcggcatctgcatcgcgcacgagggcctggtgccgctgccccgtgccgatgactcgcggctggggaaggtgcaggacgtcctgcaccaggtgaaccagagcagcgtgcaggtggtgctgctgttcgcctccgtgcacgccgcccacgccctcttcaactacagcatcagcagcaggctctcgcccaaggtgtgggtggccagcgaggcctggctgacctctgacctggtcatggggctgcccggcatggcccagatgggcacggtgcttggcttcctccagaggggtgcccagctgcacgagttcccccagtacgtgaagacgcacctggccctggccaccgacccggccttctgctctgccctgggcgagagggagcagggtctggaggaggacgtggtgggccagcgctgcccgcagtgtgactgcatcacgctgcagaacgtgagcgcagggctaaatcaccaccagacgttctctgtctacgcagctgtgtatagcgtggcccaggccctgcacaacactcttcagtgcaacgcctcaggctgccccgcgcaggaccccgtgaagccctggcagctcctggagaacatgtacaacctgaccttccacgtgggcgggctgccgctgcggttcgacagcagcggaaacgtggacatggagtacgacctgaagctgtgggtgtggcagggctcagtgcccaggctccacgacgtgggcaggttcaacggcagcctcaggacagagcgcctgaagatccgctggcacacgtctgacaaccagaagcccgtgtcccggtgctcgcggcagtgccaggagggccaggtgcgccgggtcaaggggttccactcctgctgctacgactgtgtggactgcgaggcgggcagctaccggcaaaacccagacgacatcgcctgcaccttttgtggccaggatgagtggtccccggagcgaagcacacgctgcttccgccgcaggtctcggttcctggcatggggcgagccggctgtgctgctgctgctcctgctgctgagcctggcgctgggccttgtgctggctgctttggggctgttcgttcaccatcgggacagcccactggttcaggcctcgggggggcccctggcctgctttggcctggtgtgcctgggcctggtctgcctcagcgtcctcctgttccctggccagcccagccctgcccgatgcctggcccagcagcccttgtcccacctcccgctcacgggctgcctgagcacactcttcctgcaggcggccgagatcttcgtggagtcagaactgcctctgagctgggcagaccggctgagtggctgcctgcgggggccctgggcctggctggtggtgctgctggccatgctggtggaggtcgcactgtgcacctggtacctggtggccttcccgccggaggtggtgacggactggcacatgctgcccacggaggcgctggtgcactgccgcacacgctcctgggtcagcttcggcctagcgcacgccaccaatgccacgctggcctttctctgcttcctgggcactttcctggtgcggagccagccgggccgctacaaccgtgcccgtggcctcacctttgccatgctggcctacttcatcacctgggtctcctttgtgcccctcctggccaatgtgcaggtggtcctcaggcccgccgtgcagatgggcgccctcctgctctgtgtcctgggcatcctggctgccttccacctgcccaggtgttacctgctcatgcggcagccagggctcaacacccccgagttcttcctgggagggggccctggggatgcccaaggccagaatgacgggaacacaggaaatcaggggaaacatgagtga

SEQ ID NO: 218 - protein, 852 aa, Homo sapiens
MLGPAVLGLSLWALLHPGTGAPLCLSQQLRMKGDYVLGGLFPLGEAEEAGLRSRTRPSSPVCTRFSSNGLLWALAMKMAVEEINNKSDLLPGLRLGYDLFDTCSEPVVAMKPSLMFLAKAGSRDIAAYCNYTQYQPRVLAVIGPHSSELAMVTGKFFSFFLMPQVSYGASMELLSARETFPSFFRTVPSDRVQLTAAAELLQEFGWNWVAALGSDDEYGRQGLSIFSALAAARGICIAHEGLVPLPRADDSRLGKVQDVLHQVNQSSVQVVLLFASVHAAHALFNYSISSRLSPKVWVASEAWLTSDLVMGLPGMAQMGTVLGFLQRGAQLHEFPQYVKTHLALATDPAFCSALGEREQGLEEDVVGQRCPQCDCITLQNVSAGLNHHQTFSVYAAVYSVAQALHNTLQCNASGCPAQDPVKPWQLLENMYNLTFHVGGLPLRFDSSGNVDMEYDLKLWVWQGSVPRLHDVGRFNGSLRTERLKIRWHTSDNQKPVSRCSRQCQEGQVRRVKGFHSCCYDCVDCEAGSYRQNPDDIACTFCGQDEWSPERSTRCFRRRSRFLAWGEPAVLLLLLLLSLALGLVLAALGLFVHHRDSPLVQASGGPLACFGLVCLGLVCLSVLLFPGQPSPARCLAQQPLSHLPLTGCLSTLFLQAAEIFVESELPLSWADRLSGCLRGPWAWLVVLLAMLVEVALCTWYLVAFPPEVVTDWHMLPTEALVHCRTRSWVSFGLAHATNATLAFLCFLGTFLVRSQPGRYNRARGLTFAMLAYFITWVSFVPLLANVQVVLRPAVQMGALLLCVLGILAAFHLPRCYLLMRQPGLNTPEFFLGGGPGDAQGQNDGNTGNQGKHE

SEQ ID NO: 219 - DNA, 2583 bp, Homo sapiens
  CDS (1)...(2583)
atgctgggccctgctgtcctgggcctcagcctctgggctctcctgcaccctgggacgggggccccattgtgcctgtcacagcaacttaggatgaagggggactacgtgctgggggggctgttccccctgggcgaggccgaggaggctggcctccgcagccggacacggcccagcagccctgtgtgcaccaggttctcctcaaacggcctgctctgggcactggccatgaaaatggccgtggaggagatcaacaacaagtcggatctgctgcccgggctgcgcctgggctacgacctctttgatacgtgctcggagcctgtggtggccatgaagcccagcctcatgttcctggccaaggcaggcagccgcgacatcgccgcctactgcaactacacgcagtaccagccccgtgtgctggctgtcatcgggccccactcgtcagagctcgccatggtcaccggcaagttcttcagcttcttcctcatgccccaggtcagctacggtgctagcatggagctgctgagcgcccgggagaccttcccctccttcttccgcaccgtgcccagcgaccgtgtgcagctgacggccgccgcggagctgctgcaggagttcggctggaactgggtggccgccctgggcagcgacgacgagtacggccggcagggcctgagcatcttctcggccctggccgcggcacgcggcatctgcatcgcgcacgagggcctggtgccgctgccccgtgccgatgactcgcggctggggaaggtgcaggacgtcctgcaccaggtgaaccagagcagcgtgcaggtggtgctgctgttcgcctccgtgcacgccgcccacgccctcttcaactacagcatcagcagcaggctctcgcccaaggtgtgggtggccagcgaggcctggctgacctctgacctggtcatggggctgcccggcatggcccagatgggcacggtgcttggcttcctccagaggggtgcccagctgcacgagttcccccagtacgtgaagacgcacctggccctggccaccgacccggccttctgctctgccctgggcgagagggagcagggtctggaggaggacgtggtgggccagcgctgcccgcagtgtgactgcatcacgctgcagaacgtgagcgcagggctaaatcaccaccagacgttctctgtctacgcagctgtgtatagcgtggcccaggccctgcacaacactcttcagtgcaacgcctcaggctgccccgcgcaggaccccgtgaagccctggcagctcctggagaacatgtacaacctgaccttccacgtgggcgggctgccgctgcggttcgacagcagcggaaacgtggacatggagtacgacctgaagctgtgggtgtggcagggctcagtgcccaggctccacgacgtgggcaggttcaacggcagcctcaggacagagcgcctgaagatccgctggcacacgtctgacaaccagaagcccgtgtcccggtgctcgcggcagtgccaggagggccaggtgcgccgggtcaaggggttccactcctgctgctacgactgtgtggactgcgaggcgggcagctaccggcaaaaccccccagcgcccttctcctctctcacagacgacatcgcctgcaccttttgtggccaggatgagtggtccccggagcgaagcacacgctgcttccgccgcaggtctcggttcctggcatggggcgagccggctgtgctgctgctgctcctgctgctgagcctggcgctgggccttgtgctggctgctttggggctgttcgttcaccatcgggacagcccactggttcaggcctcgggggggcccctggcctgctttggcctggtgtgcctgggcctggtctgcctcagcgtcctcctgttccctggccagcccagccctgcccgatgcctggcccagcagcccttgtcccacctcccgctcacgggctgcctgagcacactcttcctgcaggcggccgagatcttcgtggagtcagaactgcctctgagctgggcagaccggctgagtggctgcctgcgggggccctgggcctggctggtggtgctgctggccatgctggtggaggtcgcactgtgcacctggtacctggtggccttcccgccggaggtggtgacggactggcacatgctgcccacggaggcgctggtgcactgccgcacacgctcctgggtcagcttcggcctagcgcacgccaccaatgccacgctggcctttctctgcttcctgggcactttcctggtgcggagccagccgggccgctacaaccgtgcccgtggcctcacctttgccatgctggcctacttcatcacctgggtctcctttgtgcccctcctggccaatgtgcaggtggtcctcaggcccgccgtgcagatgggcgccctcctgctctgtgtcctgggcatcctggctgccttccacctgcccaggtgttacctgctcatgcggcagccagggctcaacacccccgagttcttcctgggagggggccctggggatgcccaaggccagaatgacgggaacacaggaaatcaggggaaacatgagtga

SEQ ID NO: 220 - protein, 860 aa, Homo sapiens
MLGPAVLGLSLWALLHPGTGAPLCLSQQLRMKGDYVLGGLFPLGEAEEAGLRSRTRPSSPVCTRFSSNGLLWALAMKMAVEEINNKSDLLPGLRLGYDLFDTCSEPVVAMKPSLMFLAKAGSRDIAAYCNYTQYQPRVLAVIGPHSSELAMVTGKFFSFFLMPQVSYGASMELLSARETFPSFFRTVPSDRVQLTAAAELLQEFGWNWVAALGSDDEYGRQGLSIFSALAAARGICIAHEGLVPLPRADDSRLGKVQDVLHQVNQSSVQVVLLFASVHAAHALFNYSISSRLSPKVWVASEAWLTSDLVMGLPGMAQMGTVLGFLQRGAQLHEFPQYVKTHLALATDPAFCSALGEREQGLEEDVVGQRCPQCDCITLQNVSAGLNHHQTFSVYAAVYSVAQALHNTLQCNASGCPAQDPVKPWQLLENMYNLTFHVGGLPLRFDSSGNVDMEYDLKLWVWQGSVPRLHDVGRFNGSLRTERLKIRWHTSDNQKPVSRCSRQCQEGQVRRVKGFHSCCYDCVDCEAGSYRQNPPAPFSSLTDDIACTFCGQDEWSPERSTRCFRRRSRFLAWGEPAVLLLLLLLSLALGLVLAALGLFVHHRDSPLVQASGGPLACFGLVCLGLVCLSVLLFPGQPSPARCLAQQPLSHLPLTGCLSTLFLQAAEIFVESELPLSWADRLSGCLRGPWAWLVVLLAMLVEVALCTWYLVAFPPEVVTDWHMLPTEALVHCRTRSWVSFGLAHATNATLAFLCFLGTFLVRSQPGRYNRARGLTFAMLAYFITWVSFVPLLANVQVVLRPAVQMGALLLCVLGILAAFHLPRCYLLMRQPGLNTPEFFLGGGPGDAQGQNDGNTGNQGKHE

SEQ ID NO: 221 - DNA, 3210 bp, Homo sapiens
tgccggtcaacgctggccataaagcctggcagtggcctcaggcagagtttgacgcgcacaaactttcaggcccaggaagcgaggacacccctggggccccagggtgtggcaagtdaggatggcaagggttttgctaaacaaatcctctgcccgctccccgccccgggctcactccatgttaggccccagtcggggcagccacctgccgtgcctgttggaagttgcctctgccatgctgggccctgctgtcctgggcctcagcctctgggctctcctgcaccctgggacgggggccccattgtgcctgtcacagcaacttaggatgaagggggactacgtgctgggggggctgttccccctgggcgaggccgaggaggctggcctccgcagccggacacggcccagcagccctgtgtgcaccaggttctcctcaaacggcctgctctgggcactggccatgaaaatggccgtggaggagatcaacaacaagtcggatctgctgcccgggctgcgcctgggctacgacctctttgatacgtgctcggagcctgtggtggccatgaagcccagcctcatgttcctggccaaggcaggcagccgcgacatcgccgcctactgcaactacacgcagtaccagccccgtgtgctggctgtcatcgggccccactcgtcagagctcgccatggtcaccggcaagttcttcagcttcttcctcatgccccaggtcagctacggtgctagcatggagctgctgagcgcccgggagaccttcccctccttcttccgcaccgtgcccagcgaccgtgtgcagctgacggccgccgcggagctgctgcaggagttcggctggaactgggtggccgccctgggcagcgacgacgagtacggccggcagggcctgagcatcttctcggccctggccgcggcacgcggcatctgcatcgcgcacgagggcctggtgccgctgccccgtgccgatgactcgcggctggggaaggtgcaggacgtcctgcaccaggtgaaccagagcagcgtgcaggtggtgctgctgttcgcctccgtgcacgccgcccacgccctcttcaactacagcatcagcagcaggctctcgcccaaggtgtgggtggccagcgaggcctggctgacctctgacctggtcatggggctgcccggcatggcccagatgggcacggtgcttggcttcctccagaggggtgcccagctgcacgagttcccccagtacgtgaagacgcacctggccctggccaccgacccggccttctgctctgccctgggcgagagggagcagggtctggaggaggacgtggtgggccagcgctgcccgcagtgtgactgcatcacgctgcagaacgtgagcgcagggctaaatcaccaccagacgttctctgtctacgcagctgtgtatagcgtggcccaggccctgcacaacactcttcagtgcaacgcctcaggctgccccgcgcaggaccccgtgaagccctggcagctcctggagaacatgtacaacctgaccttccacgtgggcgggctgccgctgcggttcgacagcagcggaaacgtggacatggagtacgacctgaagctgtgggtgtggcagggctcagtgcccaggctccacgacgtgggcaggttcaacggcagcctcaggacagagcgcctgaagatccgctggcacacgtctgacaaccagaagcccgtgtcccggtgctcgcggcagtgccaggagggccaggtgcgccgggtcaaggggttccactcctgctgctacgactgtgtggactgcgaggcgggcagctaccggcaaaaccccccagcgcccttctcctctctcacagacgacatcgcctgcaccttttgtggccaggatgagtggtccccggagcgaagcacacgctgcttccgccgcaggtctcggttcctggcatggggcgagccggctgtgctgctgctgctcctgctgctgagcctggcgctgggccttgtgctggctgctttggggctgttcgttcaccatcgggacagcccactggttcaggcctcgggggggcccctggcctgctttggcctggtgtgcctgggcctggtctgcctcagcgtcctcctgttccctggccagcccagccctgcccgatgcctggcccagcagcccttgtcccacctcccgctcacgggctgcctgagcacactcttcctgcaggcggccgagatcttcgtggagtcagaactgcctctgagctgggcagaccggctgagtggctgcctgcgggggccctgggcctggctggtggtgctgctggccatgctggtggaggtcgcactgtgcacctggtacctggtggccttcccgccggaggtggtgacggactggcacatgctgcccacggaggcgctggtgcactgccgcacacgctcctgggtcagcttcggcctagcgcacgccaccaatgccacgctggcctttctctgcttcctgggcactttcctggtgcggagccagccgggccgctacaaccgtgcccgtggcctcacctttgccatgctggcctacttcatcacctgggtctcctttgtgcccctcctggccaatgtgcaggtggtcctcaggcccgccgtgcagatgggcgccctcctgctctgtgtcctgggcatcctggctgccttccacctgcccaggtgttacctgctcatgcggcagccagggctcaacacccccgagttcttcctgggagggggccctggggatgcccaaggccagaatgacgggaacacaggaaatcaggggaaacatgagtgacccaaccctgtgatctcagccccggtgaacccagacttagctgcgatcccscccaagccagcaatgacccgtgtctcgctacagagaccctcccgctctaggttctgaccccaggttgtctcctgaccctgaccccacagtgagccctaggcctggagcacgtggacacccctgtgaccatctgggccccagagccaagctgtgtccctgtccctctgtgcccagaccaggcctgcccaggtaacccagacccactgttctggaaagaggcccggagggctcccagggtacccgcaacccacaccgtgagctcaggaaaaggacgcagggaggccccggccagatggctggaagcccaaatcaggccctgccgacctgaccatgtcccaccaggg

SEQ ID NO: 222 - DNA, 969 bp, Homo sapiens
  CDS (1)...(969)
atggattcaaccatcccagtcttgggtacagaactgacaccaatcaacggacgtgaggagactccttgctacaagcagaccctgagcttcacggggctgacgtgcatcgtttcccttgtcgcgctgacaggaaacgcggttgtgctctggctcctgggctgccgcatgcgcaggaacgctgtctccatctacatcctcaacctggtcgcggccgacttcctcttccttagcggccacattatacgttcgccgttacgcctcatcaatatccgccatcccatctccaaaatcctcagtcctgtgatgacctttccctactttataggcctaagcatgctgagcgccatcagcaccgagcgctgcctgtccatcctgtggcccatctggtaccactgccgccgccccagatacctgtcatcggtcatgtgtgtcctgctctgggccctgtccctgctgcggagtatcctggagtggatgttctgtgacttcctgtttagtggtgctgattctgtttggtgtgaaacgtcagatttcattacaatcgcgtggctggtttttttatgtgtggttctctgtgggtccagcctggtcctgctggtcaggattctctgtggatcccggaagatgccgctgaccaggctgtacgtgaccatcctcctcacagtgctggtcttcctcctctgtggcctgccctttggcattcagtgggccctgttttccaggatccacctggattggaaagtcttattttgtcatgtgcatctagtttccattttcctgtccgctcttaacagcagtgccaaccccatcatttacttcttcgtgggctcctttaggcagcgtcaaaataggcagaacctgaagctggttctccagagggctctgcaggacacgcctgaggtggatgaaggtggagggcagcttcctcaggaaaccctggagctgtcgggaagcagattggagcagtga

SEQ ID NO: 223 - protein, 322 aa, Homo sapiens
MDSTIPVLGTELTPINGREETPCYKQTLSFTGLTCIVSLVALTGNAVVLWLLGCRMRRNAVSIYILNLVAADFLFLSGHIIRSPLRLINIRHPISKILSPVMTFPYFIGLSMLSAISTERCLSILWPIWYHCRRPRYLSSVMCVLLWALSLLRSILEWMFCDFLFSGADSVWCETSDFITIAWLVFLCVVLCGSSLVLLVRILCGSRKMPLTRLYVTILLTVLVFLLCGLPFGIQWALFSRIHLDWKVLFCHVHLVSIFLSALNSSANPIIYFFVGSFRQRQNRQNLKLVLQRALQDTPEVDEGGGQLPQETLELSGSRLEQ

SEQ ID NO: 224 - DNA, 1659 bp, Homo sapiens
  CDS (1)...(1659)
atggtcaccaagcctggaaacatagtcgtccagcatgctctgcccaccccacgccgaggtgcactgaccatgagcctcaactcctccctcagctgcaggaaggagctgagtaatctcactgaggaggagggtggcgaagggggcgtcatcatcacccagttcatcgccatcattgtcatcaccatttttgtctgcctgggaaacctggtcatcgtggtcaccttgtacaagaagtcctacctcctcaccctcagcaacaagttcgtcttcagcctgactctgtccaacttcctgctgtccgtgttggtgctgccttttgtggtgacgagctccatccgcagggaatggatctttggtgtagtgtggtgcaacttctctgccctcctctacctgctgatcagctctgccagcatgctaaccctcggggtcattgccatcgaccgctactatgctgtcctgtaccccatggtgtaccccatgaagatcacagggaaccgggctgtgatggcacttgtctacatctggcttcactcgctcatcggctgcctgccacccctgtttggttggtcatccgtggagtttgacgagttcaaatggatgtgtgtggctgcttggcaccgggagcctggctacacggccttctggcagatctggtgtgccctcttcccctttctggtcatgctggtgtgctatggcttcatcttccgcgtggccagggtcaaggcacgcaaggtgcactgtggcacagtcgtcatcgtggaggaggatgctcagaggaccgggaggaagaactccagcacctccacctcctcttcaggcagcaggaggaatgcctttcagggtgtggtctactcggccaaccagtgcaaagccctcatcaccatcctggtggtcctcggtgccttcatggtcacctggggcccctacatggttgtcatcgcctctgaggccctctgggggaaaagctccgtctccccgagcctggagacttgggccacatggctgtcctttgccagcgctgtctgccactccctgatctatggactctggaacaagacagttcgcaaagaactactgggcatgtgctttggggaccggtattatcgggaaccatttgtgcaacgacagaggacttccaggctcttcagcatttccaacaggatcacagacctgggcctgtccccacacctcactgcgctcatggcaggtggacagcccctggggcacagcagcagcacgggggacactggcttcagctgctcccaggactcagggacagatatgatgctgcttgaggactacacgtctgatgacaaccctccctctcactgcacttgcccacccaagagaaggagctcggtgacatttgaggatgaagtggaacaaatcaaagaagctgccaagaactcgattcttcatgtgaaagctgaagtacacaagtccttggacagttacgcagcaagcttggccaaagccattgaggccgaagccaaaatcaacttatttggggaggaggctttgccaggggtcttggttacagcacggactgtcccggggggcggcttcgggggccgccgaggcagcagaactcttgtgagccagaggctgcagttgcagagcatcgaagaaggagatgttttagctgccgagcagagatga

SEQ ID NO: 225 - protein, 552 aa, Homo sapiens
MVTKPGNIVVQHALPTPRRGALTMSLNSSLSCRKELSNLTEEEGGEGGVIITQFIAIIVITIFVCLGNLVIVVTLYKKSYLLTLSNKFVFSLTLSNFLLSVLVLPFVVTSSIRREWIFGVVWCNFSALLYLLISSASMLTLGVIAIDRYYAVLYPMVYPMKITGNRAVMALVYIWLHSLIGCLPPLFGWSSVEFDEFKWMCVAAWHREPGYTAFWQIWCALFPFLVMLVCYGFIFRVARVKARKVHCGTVVIVEEDAQRTGRKNSSTSTSSSGSRRNAFQGVVYSANQCKALITILVVLGAFMVTWGPYMVVIASEALWGKSSVSPSLETWATWLSFASAVCHSLIYGLWNKTVRKELLGMCFGDRYYREPFVQRQRTSRLFSISNRITDLGLSPHLTALMAGGQPLGHSSSTGDTGFSCSQDSGTDMMLLEDYTSDDNPPSHCTCPPKRRSSVTFEDEVEQIKEAAKNSILHVKAEVHKSLDSYAASLAKAIEAEAKINLFGEEALPGVLVTARTVPGGGFGGRRGSRTLVSQRLQLQSIEEGDVLAAEQR

SEQ ID NO: 226 - DNA, 945 bp, Homo sapiens
  CDS (1)...(945)
atgggtgtaaaaaaccattccacagtgactgagtttcttctttcaggattaactgaacaagcagagcttcagctgcccctcttctgcctcttcttaggaatttacacagttactgtggtgggaaacctcagcatgatctcaattattaggctgaatcgtcaacttcatacccccatgtactatttcctgagtagtttgtcttttttagatttctgctattcttctgtcattacccctaaaatgctatcagggtttttatgcagagatagatccatctcctattctggatgcatgattcagctgttttttttctgtgtttgtgttatttctgaatgctacatgctggcagccatggcctgcgatcgctacgtggccatctgcagcccactgctctacagggtcatcatgtcccctagggtctgttctctgctggtggctgctgtcttctcagtaggtttcactgatgctgtgatccatggaggttgtatactcaggttgtctttctgtggatcaaacatcattaaacattatttctgtgacattgtccctcttattagactctcctgctccagcacttatattgatgagcttttgatttttgtcattggtggatttaacatggtggccacaagcctaacaatcattatttcatatgcttttatcctcaccagcatcctgcgcatccactctaaaaagggcaggtgcaaagcgtttagcacctgcagctcccacctgacagctgttcttatgttttatgggtctctgatgtccatgtatctcaaacctgcttctagcagttcactcacccaggagaaagtatcctcagtattttataccactgtgattcccatgttgaatcccttgatatatagtctgaggaacaatgaagtaaaaaatgctctgatgaaacttttaagaagaaaaatatctttatctccaggataa

SEQ ID NO: 227 - protein, 314 aa, Homo sapiens
MGVKNHSTVTEFLLSGLTEQAELQLPLFCLFLGIYTVTVVGNLSMISIIRLNRQLHTPMYYFLSSLSFLDFCYSSVITPKMLSGFLCRDRSISYSGCMIQLFFFCVCVISECYMLAAMACDRYVAICSPLLYRVIMSPRVCSLLVAAVFSVGFTDAVIHGGCILRLSFCGSNIIKHYFCDIVPLIRLSCSSTYIDELLIFVIGGFNMVATSLTIIISYAFILTSILRIHSKKGRCKAFSTCSSHLTAVLMFYGSLMSMYLKPASSSSLTQEKVSSVFYTTVIPMLNPLIYSLRNNEVKNALMKLLRRKISLSPG

SEQ ID NO: 228 - DNA, 945 bp, Homo sapiens
  CDS (1)...(945)
atgggtgtaaaaaaccattccacagtgactgagtttcttctttcaggattaactgaacaagcagagcttcagctgcccctcttctgcctcttcttaggaatttacacagttactgtggtgggaaacctcagcatgatctcaattattaggctgaatcgtcaacgtcatacccccatgtactatttcctgagtagtttgtcttttttagatttctgctattcttctgtcattacccctaaaatgctatcagggtttttatgcagagatagatccgtctcctattctggatgcatgattcagctgttttttttctgtgtttgtgttatttctgaatgctacatgctggcagccatggcctacgatcgctacgtggccatctgcagcccactgctctacaaggtcatcatgtcccctagggtctgttctctgctggtggctgctgtcttctcagtaggtttcactgatgctgtgatccatggaggttgtatactcaggttgtctttctgtggatcaaacatcattaaacattatttctgtgacattgtccctcttattaaactctcctgctccagcacttatattgatgagcttttgatttttgtcattggtggatttaacatggtggccacaagcctaacaatcattatttcatatgcttttatcctcaccagcatcctgcgcatccactctaaaaagggcaggtgcaaagcgtttagcacctgcagctcccacctgacagctgttcttatgttttatgggtctctgatgtccatgtatctcaaacctgcttctagcagttcactcacccaggagaaagtatcctcagtattttataccactgtgattcccatgttgaatcccttgatatatagtctgaggaacaatgaagtaaaaaatgctctgatgaaacttttaagaagaaaaatatctttatctccaggataa

SEQ ID NO: 229 - protein, 314 aa, Homo sapiens [sequence omitted]

SEQ ID NO: 230 - DNA, 1687 bp, Homo sapiens
gacgccacagttagcgggaacccgctttacaagtgaaatatccctgcgttattgaagcgaactggagtcccccacccagcacagcaaagccaaacactgacatggggctagcagcgagagaaaatgaggaaatttttgaagggcaccaagcaaggacattcaggcagctcatgcttcaggcctgcactccctgatggcttacagacagggtcttgctctgtcacctaaactggagtgcagtggtgtgattatggctcactgcagccttgacctcccaggctcgagcaatcctcccaactcagcttcctgagtagctgggactacaggtgtgcaccaccatgcccagatttctcagagaagaatgggtgtaaaaaaccattccacagtgactgagtttcttctttcaggattaactgaacaagcagagcttcagctgcccctcttctgcctcttcttaggaatttacacagttactgtggtgggaaacctcagcatgatctcaattattaggctgaatcgtcaacttcatacccccatgtactatttcctgagtagtttgtcttttttagatttctgctattcttctgtcattacccctaaaatgctatcagggtttttatgcagagatagatccatctcctattctggatgcatgattcagctgttttttttctgtgtttgtgttatttctgaatgctacatgctggcagccatggcctgcgatcgctacgtggccatctgcagcccactgctctacagggtcatcatgtcccctagggtctgttctctgctggtggctgctgtcttctcagtaggtttcactgatgctgtgatccatggaggttgtatactcaggttgtctttctgtggatcaaacatcattaaacattatttctgtgacattgtccctcttattagactctcctgctccagcacttatattgatgagcttttgatttttgtcattggtggatttaacatggtggccacaagcctaacaatcattatttcatatgcttttatcctcaccagcatcctgcgcatccactctaaaaagggcaggtgcaaagcgtttagcacctgcagctcccacctgacagctgttcttatgttttatgggtctctgatgtccatgtatctcaaacctgcttctagcagttcactcacccaggagaaagtatcctcagtattttataccactgtgattcccatgttgaatcccttgatatatagtctgaggaacaatgaagtaaaaaatgctctgatgaaacttttaagaagaaaaatatctttatctccaggataaatatgctctttattaagatctatttctgtattcataatcatgattatatgtatatatttataccttgactatttaaaagtaatttgagggccaggtacggtgacttacgcctgtaatcccagcactttgggaggccgagttgggtggatcacgaggtccggtgttcaagaccagcctggccaagatgatgaaaccccatcactattaaaattacaaaaaaattagcagggcatggtggtgggcacctgtaatcccacctacttgggaggctgaggcagaagaattgcttgaactcgggtggcggaggttgcagtgagccgagatcgcaccattgcactccagcctgggtgacaagagtgaaagtctgtctcaaaaaaaaaa

SEQ ID NO: 231 - DNA, 2337 bp, Homo sapiens
tgaggcatcctccagttacaaaccagtttaactatgtaattcaggatgtctgaagtcatatgatcctcagatacttatttaatgtaacaccttttaacatctccctggaattattcttttgctgaacacccttggaaaccttgatgtagaaaattataattcaccttaacagtagataccttctctataggaaatcctggaggaagagtcagcctttggcaaatgtgtcactagcaaaagtattctcatagtcctcagcctctagtttatgcacctacttaactaatttgctttaagaaactgtggagtcctaattagggaaggggagtcaggctggtgggagcagggaaaagcaaaaagagaaagcagatgagctacaagtctgcctttcttcatggcccaggacacacagccctcctgcacaaataactcacagtcttcctgcatccaactatcaccagacacctgcaaattagctccctgcaaccttggtgttatcagtactgcacaaagccctcttcaacaaacagcataaatatcatcctataaaattttcagcaaggctttgtatctttgcagtcagcttctgctgagtagctcgttgtctccctggcaacgtattttcctgctttctctaattagtctgtcttcctttacctacaacttgtcttgctaaattcttttactccagtggctggcatttctccacaacagaaatcccctggttttaagcattagttttgtctctaactctggagtaaaaggttctgtcgtttgctaagagaatttgttccactggagggtatggaaaagtgtgtttctggttcctaaaatctataggtaggtagatgcttaccgactccatttcatctgagtgttcactttttggttttcgtaacacaaagtcagtgttttcatagatagaaaacactgatatttgttttctatagaaacaaacactgatagaatttgactttttctctctcatctccacagatttctcagagaagaatgggtgtaaaaaaccattccacagtgactgagtttcttctttcaggattaactgaacaagcagagcttcagctgcccctcttctgcctcttcttaggaatttacacagttactgtggtgggaaacctcagcatgatctcaattattaggctgaatcgtcaacgtcatacccccatgtactatttcctgagtagtttgtcttttttagatttctgctattcttctgtcattacccctaaaatgctatcagggtttttatgcagagatagatccgtctcctattctggatgcatgattcagctgttttttttctgtgtttgtgttatttctgaatgctacatgctggcagccatggcctacgatcgctacgtggccatctgcagcccactgctctacaaggtcatcatgtcccctagggtctgttctctgctggtggctgctgtcttctcagtaggtttcactgatgctgtgatccatggaggttgtatactcaggttgtctttctgtggatcaaacatcattaaacattatttctgtgacattgtccctcttattaaactctcctgctccagcacttatattgatgagcttttgatttttgtcattggtggatttaacatggtggccacaagcctaacaatcattatttcatatgcttttatcctcaccagcatcctgcgcatccactctaaaaagggcaggtgcaaagcgtttagcacctgcagctcccacctgacagctgttcttatgttttatgggtctctgatgtccatgtatctcaaacctgcttctagcagttcactcacccaggagaaagtatcctcagtattttataccactgtgattcccatgttgaatcccttgatatatagtctgaggaacaatgaagtaaaaaatgctctgatgaaacttttaagaagaaaaatatctttatctccaggataaatatgctctttattaagatctatttctgtattcataatcatgattatatgtatatatttataccttgactatttaaaagtaatttgagggccaggtacggtgacttacgcctgtaatcccagcactttgggaggccgagttgggtggatcacgaggtccggtgttcaagaccagcctggccaagatgatgaaaccccatcactattaaaattacaaaaaaattagcagggcatggtggtgggcacctgtaatcccacctacttgggaggctgaggcagaagaattgcttgaactcgggtggcggaggttgcagtgagccgagatcgcaccattgcactccagcctgggtgacaagagtgaaagtctgtctcaaaaaaaaaa

SEQ ID NO: 232 - DNA, 2310 bp, Homo sapiens
  CDS (1)...(2310)
atgaacggacagttggatctaagtgggaagctaatcatcaaagctcaacttggggaggatattcggcgaattcctattcataatgaagatattacttatgatgaattagtgctaatgatgcaacgagttttcagaggaaaacttctgagtaatgatgaagtaacaataaagtataaagatgaagatggagatcttataacaatttttgatagttctgacctttcctttgcaattcagtgcagtaggatactgaaactgacattatttggaaaatctacttcctcatcaagcacccctacagagttctgcaggaatggtggaacctgggaaaatggcagatgtatttgtacagaagagtggaaaggactgagatgtacaattgctaatttttgtgaaaatagtacctatatgggttttacttttgccagaatcccagtgggcagatatggaccatccttgcaaacatgtggcaaggatactccaaatgcgggcaatccaatggcagtccggttgtgcagtctctctctatatggagagatagaattacaaaaagtgacaataggaaattgcaatgaaaatctggaaaccctggaaaagcaggtaaaggatgtcacagcaccacttaataacatttcttctgaagtccagattttaacatctgatgccaataaattaactgctgagaacatcactagtgctacgcgagtggttggacagatattcaacacttccagaaatgcttcacctgaggcaaagaaagttgccatagtaacagtgagtcaactcctagatgccagtgaagatgcttttcaaagagttgctgctactgctaatgatgatgcccttacaacgcttattgagcaaatggagacttattccttgtctttgggtaatcaatcagtggtggaacctaacatagcaatacagtcagcaaatttctcttcagaaaatgcggtggggccttcaaatgttcgcttctctgtgcagaaaggagctagcagttctctagtttctagttcaacatttatacatacaaatgtggatggccttaacccagatgcacagactgagcttcaggtcttgcttaatatgacgaaaaattacaccaagacatgcggctttgtagtttatcaaaatgacaagcttttccaatcaaaaacttttacagctaaatcggattttagtcaaaaaattatctcaagcaaaactgatgaaaatgagcaagatcagagtgcttctgttgacatggtctttagtccaaagtacaaccaaaaagaatttcaactctattcctatgcctgtgtctattggaatttgtcagcgaaggactgggacacatatggctgtcaaaaagacaagggcactgatggattcctgcgctgccgctgcaaccatactactaattttgctgtattaatgactttcaaaaaggattatcaatatcccaaatcacttgacatattatccaacgttggatgtgcactgtctgttactggtctggctctcacagttatatttcagattgtcaccaggaaagtcagaaaaacctcagtaacctgggttttggtcaatctgtgcatatcaatgttgattttcaacctcctctttgtgtttggaattgaaaactccaataagaacttgcagacaagtgatggtgacatcaataatattgactttgacaataatgacatacccaggacagacaccattaacatcccgaatcccatgtgcactgcgattgccgccttactgcactattttctgttagtgacatttacctggaacgcactcagcgctgcacagctctattaccttctaataaggaccatgaagcctcttcctcggcatttcattcttttcatctcattaattggatggggagtcccagctatagtagtggctataacagtgggagttatttattctcagaatggaaataatccacagtgggaattagactaccggcaagagaaaatctgctggctggcaattccagaacccaatggtgttataaaaagtccgctgttgtggtcattcatcgtacctgtaaccattatcctcatcagcaatgttgttatgtttattacaatctcgatcaaagtgctgtggaagaataaccagaacctgacaagcacaaaaaaagtttcatccatgaagaagattgttagcacattatctgttgcagttgtttttggaattacctggattctagcatacctgatgctagttaatgatgatagcatcaggatcgtcttcagctacatattctgccttttcaacactacacaggtatggtgcggattagtctga

SEQ ID NO: 233 - protein, 769 aa, Homo sapiens
MNGQLDLSGKLIIKAQLGEDIRRIPIHNEDITYDELVLMMQRVFRGKLLSNDEVTIKYKDEDGDLITIFDSSDLSFAIQCSRILKLTLFGKSTSSSSTPTEFCRNGGTWENGRCICTEEWKGLRCTIANFCENSTYMGFTFARIPVGRYGPSLQTCGKDTPNAGNPMAVRLCSLSLYGEIELQKVTIGNCNENLETLEKQVKDVTAPLNNISSEVQILTSDANKLTAENITSATRVVGQIFNTSRNASPEAKKVAIVTVSQLLDASEDAFQRVAATANDDALTTLIEQMETYSLSLGNQSVVEPNIAIQSANFSSENAVGPSNVRFSVQKGASSSLVSSSTFIHTNVDGLNPDAQTELQVLLNMTKNYTKTCGFVVYQNDKLFQSKTFTAKSDFSQKIISSKTDENEQDQSASVDMVFSPKYNQKEFQLYSYACVYWNLSAKDWDTYGCQKDKGTDGFLRCRCNHTTNFAVLMTFKKDYQYPKSLDILSNVGCALSVTGLALTVIFQIVTRKVRKTSVTWVLVNLCISMLIFNLLFVFGIENSNKNLQTSDGDINNIDFDNNDIPRTDTINIPNPMCTAIAALLHYFLLVTFTWNALSAAQLYYLLIRTMKPLPRHFILFISLIGWGVPAIVVAITVGVIYSQNGNNPQWELDYRQEKICWLAIPEPNGVIKSPLLWSFIVPVTIILISNVVMFITISIKVLWKNNQNLTSTKKVSSMKKIVSTLSVAVVFGITWILAYLMLVNDDSIRIVFSYIFCLFNTTQVWCGLV

SEQ ID NO: 234 - DNA, 891 bp, Homo sapiens
  CDS (1)...(891)
atgaacggacagttggatctaagtgggaagctaatcatcaaagctcaacttggggaggatattcggcgaattcctattcataatgaagatattacttatgatgaattagtgctaatgatgcaacgagttttcagaggaaaacttctgagtaatgatgaagtaacaataaagtataaagatgaagatggagatcttataacaatttttgatagttctgacctttcctttgcaattcagtgcagtaggatactgaaactgacattatttggaaaatctacttcctcatcaagcacccctacagagttctgcaggaatggtggaacctgggaaaatggcagatgtatttgtacagaagagtggaaaggactgagatgtacaattgctaatttttgtgaaaatagtacctatatgggttttacttttgccagaatcccagtgggcagatatggaccatccttgcaaacatgtggcaaggatactccaaatgcgggcaatccaatggcagtccggttgtgcagtctctctctatatggagagatagaattacaaaaagtgacaataggaaattgcaatgaaaatctggaaaccctggaaaagcaggtaaaggatgtcacagcaccacttaataacatttcttctgaagtccagattttaacatctgatgccaataaattaactgctgagaacatcactagtgctacgcgagtggttggacagatattcaacacttccagaaatgcttcacctgaggcaaagaaagttgccatagtaacagtgagtcaactcctagatgccagtgaagatgcttttcaaagagttgctgctactgctaatgatgatgcccttacaacattacaccaagacatgcggctttgtagtttatcaaaatga

SEQ ID NO: 235 - protein, 296 aa, Homo sapiens
MNGQLDLSGKLIIKAQLGEDIRRIPIHNEDITYDELVLMMQRVFRGKLLSNDEVTIKYKDEDGDLITIFDSSDLSFAIQCSRILKLTLFGKSTSSSSTPTEFCRNGGTWENGRCICTEEWKGLRCTIANFCENSTYMGFTFARIPVGRYGPSLQTCGKDTPNAGNPMAVRLCSLSLYGEIELQKVTIGNCNENLETLEKQVKDVTAPLNNISSEVQILTSDANKLTAENITSATRVVGQIFNTSRNASPEAKKVAIVTVSQLLDASEDAFQRVAATANDDALTTLHQDMRLCSLSK

SEQ ID NO: 236 - DNA, 2547 bp, Homo sapiens
  CDS (1)...(2547)
atgaacggacagttggatctaagtgggaagctaatcatcaaagctcaacttggggaggatattcggcgaattcctattcataatgaagatattacttatgatgaattagtgctaatgatgcaacgagttttcagaggaaaacttctgagtaatgatgaagtaacaataaagtataaagatgaagatggagatcttataacaatttttgatagttctgacctttcctttgcaattcagtgcagtaggatactgaaactgacattatttggaaaatctacttcctcatcaagcacccctacagagttctgcaggaatggtggaacctgggaaaatggcagatgtatttgtacagaagagtggaaaggactgagatgtacaattgctaatttttgtgaaaatagtacctatatgggttttacttttgccagaatcccagtgggcagatatggaccatccttgcaaacatgtggcaaggatactccaaatgcgggcaatccaatggcagtccggttgtgcagtctctctctatatggagagatagaattacaaaaagtgacaataggaaattgcaatgaaaatctggaaaccctggaaaagcaggtaaaggatgtcacagcaccacttaataacatttcttctgaagtccagattttaacatctgatgccaataaattaactgctgagaacatcactagtgctacgcgagtggttggacagatattcaacacttccagaaatgcttcacctgaggcaaagaaagttgccatagtaacagtgagtcaactcctagatgccagtgaagatgcttttcaaagagttgctgctactgctaatgatgatgcccttacaacgcttattgagcaaatggagacttattccttgtctttgggtaatcaatcagtggtggaacctaacatagcaatacagtcagcaaatttctcttcagaaaatgcggtggggccttcaaatgttcgcttctctgtgcagaaaggagctagcagttctctagtttctagttcaacatttatacatacaaatgtggatggccttaacccagatgcacagactgagcttcaggtcttgcttaatatgacgaaaaattacaccaagacatgcggctttgtagtttatcaaaatgacaagcttttccaatcaaaaacttttacagctaaatcggattttagtcaaaaaattatctcaagcaaaactgatgaaaatgagcaagatcagagtgcttctgttgacatggtctttagtccaaagtacaaccaaaaagaatttcaactctattcctatgcctgtgtctattggaatttgtcagcgaaggactgggacacatatggctgtcaaaaagacaagggcactgatggattcctgcgctgccgctgcaaccatactactaattttgctgtattaatgactttcaaaaaggattatcaatatcccaaatcacttgacatattatccaacgttggatgtgcactgtctgttactggtctggctctcacagttatatttcagattgtcaccaggaaagtcagaaaaacctcagtaacctgggttttggtcaatctgtgcatatcaatgttgattttcaacctcctctttgtgtttggaattgaaaactccaataagaacttgcagacaagtgatggtgacatcaataatattgactttgacaataatgacatacccaggacagacaccattaacatcccgaatcccatgtgcactgcgattgccgccttactgcactattttctgttagtgacatttacctggaacgcactcagcgctgcacagctctattaccttctaataaggaccatgaagcctcttcctcggcatttcattcttttcatctcattaattggatggggagtcccagctatagtagtggctataacagtgggagttatttattctcagaatggaaataatccacagtgggaattagactaccggcaagagaaaatctgctggctggcaattccagaacccaatggtgttataaaaagtccgctgttgtggtcattcatcgtacctgtaaccattatcctcatcagcaatgttgttatgtttattacaatctcgatcaaagtgctgtggaagaataaccagaacctgacaagcacaaaaaaagtttcatccatgaagaagattgttagcacattatctgttgcagttgtttttggaattacctggattctagcatacctgatgctagttaatgatgatagcatcaggatcgtcttcagctacatattctgccttttcaacactacacagggattgcaaatttttatcctgtacactgttagaacaaaagtcttccagagtgaagcttccaaagtgttgatgttgctatcgtctattgggagaaggaagtcattgccttcagtgacgcggccgaggctgcgtgtaaagatgtataatttcctcaggtcattgccaaccttacatgaacgctttaggctactggaaacctctccgagtactgaggaaatcacactctctgaaagtgacaatgcaaaggaaagcatctag

SEQ ID NO: 237 - protein, 848 aa, Homo sapiens
MNGQLDLSGKLIIKAQLGEDIRRIPIHNEDITYDELVLMMQRVFRGKLLSNDEVTIKYKDEDGDLITIFDSSDLSFAIQCSRILKLTLFGKSTSSSSTPTEFCRNGGTWENGRCICTEEWKGLRCTIANFCENSTYMGFTFARIPVGRYGPSLQTCGKDTPNAGNPMAVRLCSLSLYGEIELQKVTIGNCNENLETLEKQVKDVTAPLNNISSEVQILTSDANKLTAENITSATRVVGQIFNTSRNASPEAKKVAIVTVSQLLDASEDAFQRVAATANDDALTTLIEQMETYSLSLGNQSVVEPNIAIQSANFSSENAVGPSNVRFSVQKGASSSLVSSSTFIHTNVDGLNPDAQTELQVLLNMTKNYTKTCGFVVYQNDKLFQSKTFTAKSDFSQKIISSKTDENEQDQSASVDMVFSPKYNQKEFQLYSYACVYWNLSAKDWDTYGCQKDKGTDGFLRCRCNHTTNFAVLMTFKKDYQYPKSLDILSNVGCALSVTGLALTVIFQIVTRKVRKTSVTWVLVNLCISMLIFNLLFVFGIENSNKNLQTSDGDINNIDFDNNDIPRTDTINIPNPMCTAIAALLHYFLLVTFTWNALSAAQLYYLLIRTMKPLPRHFILFISLIGWGVPAIVVAITVGVIYSQNGNNPQWELDYRQEKICWLAIPEPNGVIKSPLLWSFIVPVTIILISNVVMFITISIKVLWKNNQNLTSTKKVSSMKKIVSTLSVAVVFGITWILAYLMLVNDDSIRIVFSYIFCLFNTTQGLQIFILYTVRTKVFQSEASKVLMLLSSIGRRKSLPSVTRPRLRVKMYNFLRSLPTLHERFRLLETSPSTEEITLSESDNAKESI

SEQ ID NO: 238 - DNA, 1446 bp, Homo sapiens
  CDS (1)...(1446)
atggagacttattccttgtctttgggtaatcaatcagtggtggaacctaacatagcaatacagtcagcaaatttctcttcagaaaatgcggtggggccttcaaatgttcgcttctctgtgcagaaaggagctagcagttctctagtttctagttcaacatttatacatacaaatgtggatggccttaacccagatgcacagactgagcttcaggtcttgcttaatatgacgaaaaattacaccaagacatgcggctttgtagtttatcaaaatgacaagcttttccaatcaaaaacttttacagctaaatcggattttagtcaaaaaattatctcaagcaaaactgatgaaaatgagcaagatcagagtgcttctgttgacatggtctttagtccaaagtacaaccaaaaagaatttcaactctattcctatgcctgtgtctattggaatttgtcagcgaaggactgggacacatatggctgtcaaaaagacaagggcactgatggattcctgcgctgccgctgcaaccatactactaattttgctgtattaatgactttcaaaaaggattatcaatatcccaaatcacttgacatattatccaacgttggatgtgcactgtctgttactggtctggctctcacagttatatttcagattgtcaccaggaaagtcagaaaaacctcagtaacctgggttttggtcaatctgtgcatatcaatgttgattttcaacctcctctttgtgtttggaattgaaaactccaataagaacttgcagacaagtgatggtgacatcaataatattgactttgacaataatgacatacccaggacagacaccattaacatcccgaatcccatgtgcactgcgattgccgccttactgcactattttctgttagtgacatttacctggaacgcactcagcgctgcacagctctattaccttctaataaggaccatgaagcctcttcctcggcatttcattcttttcatctcattaattggatggggagtcccagctatagtagtggctataacagtgggagttatttattctcagaatggaaataatccacagtgggaattagactaccggcaagagaaaatctgctggctggcaattccagaacccaatggtgttataaaaagtccgctgttgtggtcattcatcgtacctgtaaccattatcctcatcagcaatgttgttatgtttattacaatctcgatcaaagtgctgtggaagaataaccagaacctgacaagcacaaaaaaagtttcatccatgaagaagattgttagcacattatctgttgcagttgtttttggaattacctggattctagcatacctgatgctagttaatgatgatagcatcaggatcgtcttcagctacatattctgccttttcaacactacacaggtatggtgcggattagtctga

SEQ ID NO: 239 - protein, 481 aa, Homo sapiens
METYSLSLGNQSVVEPNIAIQSANFSSENAVGPSNVRFSVQKGASSSLVSSSTFIHTNVDGLNPDAQTELQVLLNMTKNYTKTCGFVVYQNDKLFQSKTFTAKSDFSQKIISSKTDENEQDQSASVDMVFSPKYNQKEFQLYSYACVYWNLSAKDWDTYGCQKDKGTDGFLRCRCNHTTNFAVLMTFKKDYQYPKSLDILSNVGCALSVTGLALTVIFQIVTRKVRKTSVTWVLVNLCISMLIFNLLFVFGIENSNKNLQTSDGDINNIDFDNNDIPRTDTINIPNPMCTAIAALLHYFLLVTFTWNALSAAQLYYLLIRTMKPLPRHFILFISLIGWGVPAIVVAITVGVIYSQNGNNPQWELDYRQEKICWLAIPEPNGVIKSPLLWSFIVPVTIILISNVVMFITISIKVLWKNNQNLTSTKKVSSMKKIVSTLSVAVVFGITWILAYLMLVNDDSIRIVFSYIFCLFNTTQVWCGLV

SEQ ID NO: 240 - DNA, 1272 bp, Homo sapiens
  CDS (1)...(1272)
atgccagtgaagatgcttttcaaagagttgctgctactgctaatgatgatgcccttacaacattacaccaagacatgcggctttgtagtttatcaaaatgacaagcttttccaatcaaaaacttttacagctaaatcggattttagtcaaaaaattatctcaagcaaaactgatgaaaatgagcaagatcagagtgcttctgttgacatggtctttagtccaaagtacaaccaaaaagaatttcaactctattcctatgcctgtgtctattggaatttgtcagcgaaggactgggacacatatggctgtcaaaaagacaagggcactgatggattcctgcgctgccgctgcaaccatactactaattttgctgtattaatgactttcaaaaaggattatcaatatcccaaatcacttgacatattatccaacgttggatgtgcactgtctgttactggtctggctctcacagttatatttcagattgtcaccaggaaagtcagaaaaacctcagtaacctgggttttggtcaatctgtgcatatcaatgttgattttcaacctcctctttgtgtttggaattgaaaactccaataagaacttgcagacaagtgatggtgacatcaataatattgactttgacaataatgacatacccaggacagacaccattaacatcccgaatcccatgtgcactgcgattgccgccttactgcactattttctgttagtgacatttacctggaacgcactcagcgctgcacagctctattaccttctaataaggaccatgaagcctcttcctcggcatttcattcttttcatctcattaattggatggggagtcccagctatagtagtggctataacagtgggagttatttattctcagaatggaaataatccacagtgggaattagactaccggcaagagaaaatctgctggctggcaattccagaacccaatggtgttataaaaagtccgctgttgtggtcattcatcgtacctgtaaccattatcctcatcagcaatgttgttatgtttattacaatctcgatcaaagtgctgtggaagaataaccagaacctgacaagcacaaaaaaagtttcatccatgaagaagattgttagcacattatctgttgcagttgtttttggaattacctggattctagcatacctgatgctagttaatgatgatagcatcaggatcgtcttcagctacatattctgccttttcaacactacacaggtatggtgcggattagtctga

SEQ ID NO: 241 - protein, 423 aa, Homo sapiens
MPVKMLFKELLLLLMMMPLQHYTKTCGFVVYQNDKLFQSKTFTAKSDFSQKIISSKTDENEQDQSASVDMVFSPKYNQKEFQLYSYACVYWNLSAKDWDTYGCQKDKGTDGFLRCRCNHTTNFAVLMTFKKDYQYPKSLDILSNVGCALSVTGLALTVIFQIVTRKVRKTSVTWVLVNLCISMLIFNLLFVFGIENSNKNLQTSDGDINNIDFDNNDIPRTDTINIPNPMCTAIAALLHYFLLVTFTWNALSAAQLYYLLIRTMKPLPRHFILFISLIGWGVPAIVVAITVGVIYSQNGNNPQWELDYRQEKICWLAIPEPNGVIKSPLLWSFIVPVTIILISNVVMFITISIKVLWKNNQNLTSTKKVSSMKKIVSTLSVAVVFGITWILAYLMLVNDDSIRIVFSYIFCLFNTTQVWCGLV

SEQ ID NO: 242 - DNA, 1683 bp, Homo sapiens
  CDS (1)...(1683)
atggagacttattccttgtctttgggtaatcaatcagtggtggaacctaacatagcaatacagtcagcaaatttctcttcagaaaatgcggtggggccttcaaatgttcgcttctctgtgcagaaaggagctagcagttctctagtttctagttcaacatttatacatacaaatgtggatggccttaacccagatgcacagactgagcttcaggtcttgcttaatatgacgaaaaattacaccaagacatgcggctttgtagtttatcaaaatgacaagcttttccaatcaaaaacttttacagctaaatcggattttagtcaaaaaattatctcaagcaaaactgatgaaaatgagcaagatcagagtgcttctgttgacatggtctttagtccaaagtacaaccaaaaagaatttcaactctattcctatgcctgtgtctattggaatttgtcagcgaaggactgggacacatatggctgtcaaaaagacaagggcactgatggattcctgcgctgccgctgcaaccatactactaattttgctgtattaatgactttcaaaaaggattatcaatatcccaaatcacttgacatattatccaacgttggatgtgcactgtctgttactggtctggctctcacagttatatttcagattgtcaccaggaaagtcagaaaaacctcagtaacctgggttttggtcaatctgtgcatatcaatgttgattttcaacctcctctttgtgtttggaattgaaaactccaataagaacttgcagacaagtgatggtgacatcaataatattgactttgacaataatgacatacccaggacagacaccattaacatcccgaatcccatgtgcactgcgattgccgccttactgcactattttctgttagtgacatttacctggaacgcactcagcgctgcacagctctattaccttctaataaggaccatgaagcctcttcctcggcatttcattcttttcatctcattaattggatggggagtcccagctatagtagtggctataacagtgggagttatttattctcagaatggaaataatccacagtgggaattagactaccggcaagagaaaatctgctggctggcaattccagaacccaatggtgttataaaaagtccgctgttgtggtcattcatcgtacctgtaaccattatcctcatcagcaatgttgttatgtttattacaatctcgatcaaagtgctgtggaagaataaccagaacctgacaagcacaaaaaaagtttcatccatgaagaagattgttagcacattatctgttgcagttgtttttggaattacctggattctagcatacctgatgctagttaatgatgatagcatcaggatcgtcttcagctacatattctgccttttcaacactacacagggattgcaaatttttatcctgtacactgttagaacaaaagtcttccagagtgaagcttccaaagtgttgatgttgctatcgtctattgggagaaggaagtcattgccttcagtgacgcggccgaggctgcgtgtaaagatgtataatttcctcaggtcattgccaaccttacatgaacgctttaggctactggaaacctctccgagtactgaggaaatcacactctctgaaagtgacaatgcaaaggaaagcatctag

SEQ ID NO: 243 - protein, 560 aa, Homo sapiens
METYSLSLGNQSVVEPNIAIQSANFSSENAVGPSNVRFSVQKGASSSLVSSSTFIHTNVDGLNPDAQTELQVLLNMTKNYTKTCGFVVYQNDKLFQSKTFTAKSDFSQKIISSKTDENEQDQSASVDMVFSPKYNQKEFQLYSYACVYWNLSAKDWDTYGCQKDKGTDGFLRCRCNHTTNFAVLMTFKKDYQYPKSLDILSNVGCALSVTGLALTVIFQIVTRKVRKTSVTWVLVNLCISMLIFNLLFVFGIENSNKNLQTSDGDINNIDFDNNDIPRTDTINIPNPMCTAIAALLHYFLLVTFTWNALSAAQLYYLLIRTMKPLPRHFILFISLIGWGVPAIVVAITVGVIYSQNGNNPQWELDYRQEKICWLAIPEPNGVIKSPLLWSFIVPVTIILISNVVMFITISIKVLWKNNQNLTSTKKVSSMKKIVSTLSVAVVFGITWILAYLMLVNDDSIRIVFSYIFCLFNTTQGLQIFILYTVRTKVFQSEASKVLMLLSSIGRRKSLPSVTRPRLRVKMYNFLRSLPTLHERFRLLETSPSTEEITLSESDNAKESI

SEQ ID NO: 244 - DNA, 1509 bp, Homo sapiens
  CDS (1)...(1509)
atgccagtgaagatgcttttcaaagagttgctgctactgctaatgatgatgcccttacaacattacaccaagacatgcggctttgtagtttatcaaaatgacaagcttttccaatcaaaaacttttacagctaaatcggattttagtcaaaaaattatctcaagcaaaactgatgaaaatgagcaagatcagagtgcttctgttgacatggtctttagtccaaagtacaaccaaaaagaatttcaactctattcctatgcctgtgtctattggaatttgtcagcgaaggactgggacacatatggctgtcaaaaagacaagggcactgatggattcctgcgctgccgctgcaaccatactactaattttgctgtattaatgactttcaaaaaggattatcaatatcccaaatcacttgacatattatccaacgttggatgtgcactgtctgttactggtctggctctcacagttatatttcagattgtcaccaggaaagtcagaaaaacctcagtaacctgggttttggtcaatctgtgcatatcaatgttgattttcaacctcctctttgtgtttggaattgaaaactccaataagaacttgcagacaagtgatggtgacatcaataatattgactttgacaataatgacatacccaggacagacaccattaacatcccgaatcccatgtgcactgcgattgccgccttactgcactattttctgttagtgacatttacctggaacgcactcagcgctgcacagctctattaccttctaataaggaccatgaagcctcttcctcggcatttcattcttttcatctcattaattggatggggagtcccagctatagtagtggctataacagtgggagttatttattctcagaatggaaataatccacagtgggaattagactaccggcaagagaaaatctgctggctggcaattccagaacccaatggtgttataaaaagtccgctgttgtggtcattcatcgtacctgtaaccattatcctcatcagcaatgttgttatgtttattacaatctcgatcaaagtgctgtggaagaataaccagaacctgacaagcacaaaaaaagtttcatccatgaagaagattgttagcacattatctgttgcagttgtttttggaattacctggattctagcatacctgatgctagttaatgatgatagcatcaggatcgtcttcagctacatattctgccttttcaacactacacagggattgcaaatttttatcctgtacactgttagaacaaaagtcttccagagtgaagcttccaaagtgttgatgttgctatcgtctattgggagaaggaagtcattgccttcagtgacgcggccgaggctgcgtgtaaagatgtataatttcctcaggtcattgccaaccttacatgaacgctttaggctactggaaacctctccgagtactgaggaaatcacactctctgaaagtgacaatgcaaaggaaagcatctag

SEQ ID NO: 245 - protein, 502 aa, Homo sapiens
MPVKMLFKELLLLLMMMPLQHYTKTCGFVVYQNDKLFQSKTFTAKSDFSQKIISSKTDENEQDQSASVDMVFSPKYNQKEFQLYSYACVYWNLSAKDWDTYGCQKDKGTDGFLRCRCNHTTNFAVLMTFKKDYQYPKSLDILSNVGCALSVTGLALTVIFQIVTRKVRKTSVTWVLVNLCISMLIFNLLFVFGIENSNKNLQTSDGDINNIDFDNNDIPRTDTINIPNPMCTAIAALLHYFLLVTFTWNALSAAQLYYLLIRTMKPLPRHFILFISLIGWGVPAIVVAITVGVIYSQNGNNPQWELDYRQEKICWLAIPEPNGVIKSPLLWSFIVPVTIILISNVVMFITISIKVLWKNNQNLTSTKKVSSMKKIVSTLSVAVVFGITWILAYLMLVNDDSIRIVFSYIFCLFNTTQGLQIFILYTVRTKVFQSEASKVLMLLSSIGRRKSLPSVTRPRLRVKMYNFLRSLPTLHERFRLLETSPSTEEITLSESDNAKESI

SEQ ID NO: 246 - DNA, 726 bp, Homo sapiens
  CDS (1)...(726)
atgttgattttcaacctcctctttgtgtttggaattgaaaactccaataagaacttgcagacaagtgatggtgacatcaataatattgactttgacaataatgacatacccaggacagacaccattaacatcccgaatcccatgtgcactgcgattgccgccttactgcactattttctgttagtgacatttacctggaacgcactcagcgctgcacagctctattaccttctaataaggaccatgaagcctcttcctcggcatttcattcttttcatctcattaattggatggggagtcccagctatagtagtggctataacagtgggagttatttattctcagaatggaaataatccacagtgggaattagactaccggcaagagaaaatctgctggctggcaattccagaacccaatggtgttataaaaagtccgctgttgtggtcattcatcgtacctgtaaccattatcctcatcagcaatgttgttatgtttattacaatctcgatcaaagtgctgtggaagaataaccagaacctgacaagcacaaaaaaagtttcatccatgaagaagattgttagcacattatctgttgcagttgtttttggaattacctggattctagcatacctgatgctagttaatgatgatagcatcaggatcgtcttcagctacatattctgccttttcaacactacacaggtatggtgcggattagtctga

SEQ ID NO: 247 - protein, 241 aa, Homo sapiens
MLIFNLLFVFGIENSNKNLQTSDGDINNIDFDNNDIPRTDTINIPNPMCTAIAALLHYFLLVTFTWNALSAAQLYYLLIRTMKPLPRHFILFISLIGWGVPAIVVAITVGVIYSQNGNNPQWELDYRQEKICWLAIPEPNGVIKSPLLWSFIVPVTIILISNVVMFITISIKVLWKNNQNLTSTKKVSSMKKIVSTLSVAVVFGITWILAYLMLVNDDSIRIVFSYIFCLFNTTQVWCGLV

SEQ ID NO: 248 - DNA, 963 bp, Homo sapiens
  CDS (1)...(963)
atgttgattttcaacctcctctttgtgtttggaattgaaaactccaataagaacttgcagacaagtgatggtgacatcaataatattgactttgacaataatgacatacccaggacagacaccattaacatcccgaatcccatgtgcactgcgattgccgccttactgcactattttctgttagtgacatttacctggaacgcactcagcgctgcacagctctattaccttctaataaggaccatgaagcctcttcctcggcatttcattcttttcatctcattaattggatggggagtcccagctatagtagtggctataacagtgggagttatttattctcagaatggaaataatccacagtgggaattagactaccggcaagagaaaatctgctggctggcaattccagaacccaatggtgttataaaaagtccgctgttgtggtcattcatcgtacctgtaaccattatcctcatcagcaatgttgttatgtttattacaatctcgatcaaagtgctgtggaagaataaccagaacctgacaagcacaaaaaaagtttcatccatgaagaagattgttagcacattatctgttgcagttgtttttggaattacctggattctagcatacctgatgctagttaatgatgatagcatcaggatcgtcttcagctacatattctgccttttcaacactacacagggattgcaaatttttatcctgtacactgttagaacaaaagtcttccagagtgaagcttccaaagtgttgatgttgctatcgtctattgggagaaggaagtcattgccttcagtgacgcggccgaggctgcgtgtaaagatgtataatttcctcaggtcattgccaaccttacatgaacgctttaggctactggaaacctctccgagtactgaggaaatcacactctctgaaagtgacaatgcaaaggaaagcatctag

SEQ ID NO: 249 - protein, 320 aa, Homo sapiens
MLIFNLLFVFGIENSNKNLQTSDGDINNIDFDNNDIPRTDTINIPNPMCTAIAALLHYFLLVTFTWNALSAAQLYYLLIRTMKPLPRHFILFISLIGWGVPAIVVAITVGVIYSQNGNNPQWELDYRQEKICWLAIPEPNGVIKSPLLWSFIVPVTIILISNVVMFITISIKVLWKNNQNLTSTKKVSSMKKIVSTLSVAVVFGITWILAYLMLVNDDSIRIVFSYIFCLFNTTQGLQIFILYTVRTKVFQSEASKVLMLLSSIGRRKSLPSVTRPRLRVKMYNFLRSLPTLHERFRLLETSPSTEEITLSESDNAKESI

SEQ ID NO: 250 - DNA, 3057 bp, Homo sapiens
ggcggcggccgcggcctccgcaagccgtctttctctagagttgtatatatagaacatcctggagtccaccatgaacggacagttggatctaagtgggaagctaatcatcaaagctcaacttggggaggatattcggcgaattcctattcataatgaagatattacttatgatgaattagtgctaatgatgcaacgagttttcagaggaaaacttctgagtaatgatgaagtaacaataaagtataaagatgaagatggagatcttataacaatttttgatagttctgacctttcctttgcaattcagtgcagtaggatactgaaactgacattatttggaaaatctacttcctcatcaagcacccctacagagttctgcaggaatggtggaacctgggaaaatggcagatgtatttgtacagaagagtggaaaggactgagatgtacaattgctaatttttgtgaaaatagtacctatatgggttttacttttgccagaatcccagtgggcagatatggaccatccttgcaaacatgtggcaaggatactccaaatgcgggcaatccaatggcagtccggttgtgcagtctctctctatatggagagatagaattacaaaaagtgacaataggaaattgcaatgaaaatctggaaaccctggaaaagcaggtaaaggatgtcacagcaccacttaataacatttcttctgaagtccagattttaacatctgatgccaataaattaactgctgagaacatcactagtgctacgcgagtggttggacagatattcaacacttccagaaatgcttcacctgaggcaaagaaagttgccatagtaacagtgagtcaactcctagatgccagtgaagatgcttttcaaagagttgctgctactgctaatgatgatgcccttacaacgcttattgagcaaatggagacttattccttgtctttgggtaatcaatcagtggtggaacctaacatagcaatacagtcagcaaatttctcttcagaaaatgcggtggggccttcaaatgttcgcttctctgtgcagaaaggagctagcagttctctagtttctagttcaacatttatacatacaaatgtggatggccttaacccagatgcacagactgagcttcaggtcttgcttaatatgacgaaaaattacaccaagacatgcggctttgtagtttatcaaaatgacaagcttttccaatcaaaaacttttacagctaaatcggattttagtcaaaaaattatctcaagcaaaactgatgaaaatgagcaagatcagagtgcttctgttgacatggtctttagtccaaagtacaaccaaaaagaatttcaactctattcctatgcctgtgtctattggaatttgtcagcgaaggactgggacacatatggctgtcaaaaagacaagggcactgatggattcctgcgctgccgctgcaaccatactactaattttgctgtattaatgactttcaaaaaggattatcaatatcccaaatcacttgacatattatccaacgttggatgtgcactgtctgttactggtctggctctcacagttatatttcagattgtcaccaggaaagtcagaaaaacctcagtaacctgggttttggtcaatctgtgcatatcaatgttgattttcaacctcctctttgtgtttggaattgaaaactccaataagaacttgcagacaagtgatggtgacatcaataatattgactttgacaataatgacatacccaggacagacaccattaacatcccgaatcccatgtgcactgcgattgccgccttactgcactattttctgttagtgacatttacctggaacgcactcagcgctgcacagctctattaccttctaataaggaccatgaagcctcttcctcggcatttcattcttttcatctcattaattggatggggagtcccagctatagtagtggctataacagtgggagttatttattctcagaatggaaataatccacagtgggaattagactaccggcaagagaaaatctgctggctggcaattccagaacccaatggtgttataaaaagtccgctgttgtggtcattcatcgtacctgtaaccattatcctcatcagcaatgttgttatgtttattacaatctcgatcaaagtgctgtggaagaataaccagaacctgacaagcacaaaaaaagtttcatccatgaagaagattgttagcacattatctgttgcagttgtttttggaattacctggattctagcatacctgatgctagttaatgatgatagcatcaggatcgtcttcagctacatattctgccttttcaacactacacagggattgcaaatttttatcctgtacactgttagaacaaaagtcttccagagtgaagcttccaaagtgttgatgttgctatcgtctattgggagaaggaagtcattgccttcagtgacgcggccgaggctgcgtgtaaagatgtataatttcctcaggtcattgccaaccttacatgaacgctttaggctactggaaacctctccgagtactgaggaaatcacactctctgaaagtgacaatgcaaaggaaagcatctagacagtaaaacttacctgttgtggtctttttaatcacctcgtttgagttttatctgtttctctcctttatttcccagtcctctcagaaagtcttcctcaatgtattttgctcaggattaagaattagataaaacctgttgtttattattattcggcataatggacttggtagtttttctatttttcaatagatttgtacttgaataaggtgaagaatttcacacaacatacaagagtaccattgttccttatatcgttaaatctttgtgacacactttgacaaaaatgtagaacctataacaaattcttttacaagttactataaaggacacaaagagaaaactttaccttccagaacaaaatgactcctgatgaacagtgtgtggggatttgcttgtatgtattaaacttttgacctctgaaaaaaaaaaaaaaaaaaaa

SEQ ID NO: 251 - DNA, 2985 bp, Homo sapiens
  CDS (1)...(2985)
atggtctgttcggctgccccactgctgctcctggccacaactcttcccctgctggggtcaccagttgcccaagcatcccaacctggacagagtcaggctggaggggaatctggatctgggcagctcctggaccaagagaatggagcaggggaatcagcgctggtctccgtctatgtacatctggactttccagataagacctggccccctgaactctccaggacactgactctccctgctgcctcagcttcctcttccccaaggcctcttctcactggcctcagactcacaacagagtgtaatgtcaaccacaaggggaatttctattgtgcttgcctctctggctaccagtggaacaccagcatctgcctccattaccctccttgtcaaagcctccacaaccaccagccttgtggctgccttgtcttcagccatcccgaacccgggtactgccagttgctgccacctgtccccgggatcctcaacctgaactcccagctgcagatgcctggtgacacgctgagcctgactctccatctgagccaggaggccaccaacctgagctggttcctgaggcacccagggagccccagtcccatcctcctgcagccagggacacaggtgtctgtgacttccagccacggccaggctgccctcagcgtctccaacatgtcccatcactgggcaggtgagtacatgagctgcttcgaggcccagggcttcaagtggaacctgtatgaggtggtgagggtgcccttgaaggcgacagatgtggctcgacttccataccagctgtccatctcctgtgccacctcccctggcttccagctgagctgctgcatccccagcacaaacctggcctacaccgcggcctggagccctggagagggcagcaaagcttcctccttcaacgagtcaggctctcagtgctttgtgctggctgttcagcgctgcccgatggctgacaccacgtacacttgtgacctgcagagcctgggcctggctccactcagggtccccatctccatcaccatcatccaggatggagacatcacctgccctgaggacgcctcggtgctcacctggaatgtcaccaaggctggccacgtggcacaggccccatgtcctgagagcaagaggggcatagtgaggaggctctgtggggctgacggagtctgggggccggtccacagcagctgcacagatgcgaggctcctggccttgttcactagaaccaagctgctgcaggcaggccagggcagtcctgctgaggaggtgccacagatcctggcacagctgccagggcaggcggcagaggcaagttcaccctccgacttactgaccctgctgagcaccatgaaatacgtggccaaggtggtggcagaggccagaatacagcttgaccgcagagccctgaagaatctcctgattgccacagacaaggtcctagatatggacaccaggtctctgtggaccctggcccaagcccggaagccctgggcaggctcgactctcctgctggctgtggagaccctggcatgcagcctgtgcccacaggactaccccttcgccttcagcttacccaatgtgctgctgcagagccagctgtttggacccacgtttcctgctgactacagcatctccttccctactcggcccccactgcaggctcagattcccaggcactcactggccccattggtccgtaatggaactgaaataagtattactagcctggtgctgcgaaaactggaccaccttctgccctcaaactatggacaagggctgggggattccctctatgccactcctggcctggtccttgtcatttccatcatggcaggtgaccgggccttcagccagggagaggtcatcatggactttgggaacacagatggttcccctcactgtgtcttctgggatcacagtctcttccagggcagggggggttggtccaaagaagggtgccaggcacaggtggccagtgccagccccactgctcagtgcctctgccagcacctcactgccttctccgtcctcatgtccccacacactgttccggaagaacccgctctggcgctgctgactcargtgggcttgggagcttccatactggcgctgcttgtgtgcctgggtgtgtactggctggtgtggagagtcgtggtgcggaacaagatctcctatttccgccacgccgccctgctcaacatggtgttctgcttgctggccgcagacacttgcttcctgggcgccccattcctctctccagggccccgaagcccgctctgccttgctgccgccttcctctgtcatttcctctacctggccacctttttctggatgctggcgcaggccctggtgttggcccaccagctgctctttgtctttcaccagctggcaaagcaccgagttctccccctcatggtgctcctgggctacctgtgcccactggggttggcaggtgtcaccctggggctctacctacctcaagggcaatacctgagggagggggaatgctggttggatgggaagggaggggcgttatacaccttcgtggggccagtgctggccatcataggcgtgaatgggctggtactagccatggccatgctgaagttgctgagaccttcgctgtcagagggacccccagcagagaagcgccaagctctgctgggggtgatcaaagccctgctcattcttacacccatctttggcctcacctgggggctgggcctggccactctgttagaggaagtctccacggtccctcattacatcttcaccattctcaacaccctccagggcgtcttcatcctattgtttggttgcctcatggacaggaagatacaagaagctttgcgcaaacgcttctgccgcgcccaagcccccagctccaccatctccctggccacaaatgaaggctgcatcttggaacacagcaaaggaggaagcgacactgccaggaagacagatgcttcagagtga

SEQ ID NO: 252 - protein, 994 aa, Homo sapiens
MVCSAAPLLLLATTLPLLGSPVAQASQPGQSQAGGESGSGQLLDQENGAGESALVSVYVHLDFPDKTWPPELSRTLTLPAASASSSPRPLLTGLRLTTECNVNHKGNFYCACLSGYQWNTSICLHYPPCQSLHNHQPCGCLVFSHPEPGYCQLLPPVPGILNLNSQLQMPGDTLSLTLHLSQEATNLSWFLRHPGSPSPILLQPGTQVSVTSSHGQAALSVSNMSHHWAGEYMSCFEAQGFKWNLYEVVRVPLKATDVARLPYQLSISCATSPGFQLSCCIPSTNLAYTAAWSPGEGSKASSFNESGSQCFVLAVQRCPMADTTYTCDLQSLGLAPLRVPISITIIQDGDITCPEDASVLTWNVTKAGHVAQAPCPESKRGIVRRLCGADGVWGPVHSSCTDARLLALFTRTKLLQAGQGSPAEEVPQILAQLPGQAAEASSPSDLLTLLSTMKYVAKVVAEARIQLDRRALKNLLIATDKVLDMDTRSLWTLAQARKPWAGSTLLLAVETLACSLCPQDYPFAFSLPNVLLQSQLFGPTFPADYSISFPTRPPLQAQIPRHSLAPLVRNGTEISITSLVLRKLDHLLPSNYGQGLGDSLYATPGLVLVISIMAGDRAFSQGEVIMDFGNTDGSPHCVFWDHSLFQGRGGWSKEGCQAQVASASPTAQCLCQHLTAFSVLMSPHTVPEEPALALLTQVGLGASILALLVCLGVYWLVWRVVVRNKISYFRHAALLNMVFCLLAADTCFLGAPFLSPGPRSPLCLAAAFLCHFLYLATFFWMLAQALVLAHQLLFVFHQLAKHRVLPLMVLLGYLCPLGLAGVTLGLYLPQGQYLREGECWLDGKGGALYTFVGPVLAIIGVNGLVLAMAMLKLLRPSLSEGPPAEKRQALLGVIKALLILTPIFGLTWGLGLATLLEEVSTVPHYIFTILNTLQGVFILLFGCLMDRKIQEALRKRFCRAQAPSSTISLATNEGCILEHSKGGSDTARKTDASE

SEQ ID NO: 253 - DNA, 2481 bp, Homo sapiens
  CDS (1)...(2481)
atgcctggtgacacgctgagcctgactctccatctgagccaggaggccaccaacctgagctggttcctgaggcacccagggagccccagtcccatcctcctgcagccagggacacaggtgtctgtgacttccagccacggccaggctgccctcagcgtctccaacatgtcccatcactgggcaggtgagtacatgagctgcttcgaggcccagggcttcaagtggaacctgtatgaggtggtgagggtgcccttgaaggcgacagatgtggctcgacttccataccagctgtccatctcctgtgccacctcccctggcttccagctgagctgctgcatccccagcacaaacctggcctacaccgcggcctggagccctggagagggcagcaaagcttcctccttcaacgagtcaggctctcagtgctttgtgctggctgttcagcgctgcccgatggctgacaccacgtacacttgtgacctgcagagcctgggcctggctccactcagggtccccatctccatcaccatcatccaggatggagacatcacctgccctgaggacgcctcggtgctcacctggaatgtcaccaaggctggccacgtggcacaggccccatgtcctgagagcaagaggggcatagtgaggaggctctgtggggctgacggagtctgggggccggtccacagcagctgcacagatgcgaggctcctggccttgttcactagaaccaagctgctgcaggcaggccagggcagtcctgctgaggaggtgccacagatcctggcacagctgccagggcaggcggcagaggcaagttcaccctccgacttactgaccctgctgagcaccatgaaatacgtggccaaggtggtggcagaggccagaatacagcttgaccgcagagccctgaagaatctcctgattgccacagacaaggtcctagatatggacaccaggtctctgtggaccctggcccaagcccggaagccctgggcaggctcgactctcctgctggctgtggagaccctggcatgcagcctgtgcccacaggactaccccttcgccttcagcttacccaatgtgctgctgcagagccagctgtttggacccacgtttcctgctgactacagcatctccttccctactcggcccccactgcaggctcagattcccaggcactcactggccccattggtccgtaatggaactgaaataagtattactagcctggtgctgcgaaaactggaccaccttctgccctcaaactatggacaagggctgggggattccctctatgccactcctggcctggtccttgtcatttccatcatggcaggtgaccgggccttcagccagggagaggtcatcatggactttgggaacacagatggttcccctcactgtgtcttctgggatcacagtctcttccagggcagggggggttggtccaaagaagggtgccaggcacaggtggccagtgccagccccactgctcagtgcctctgccagcacctcactgccttctccgtcctcatgtccccacacactgttccggaagaacccgctctggcgctgctgactcargtgggcttgggagcttccatactggcgctgcttgtgtgcctgggtgtgtactggctggtgtggagagtcgtggtgcggaacaagatctcctatttccgccacgccgccctgctcaacatggtgttctgcttgctggccgcagacacttgcttcctgggcgccccattcctctctccagggccccgaagcccgctctgccttgctgccgccttcctctgtcatttcctctacctggccacctttttctggatgctggcgcaggccctggtgttggcccaccagctgctctttgtctttcaccagctggcaaagcaccgagttctccccctcatggtgctcctgggctacctgtgcccactggggttggcaggtgtcaccctggggctctacctacctcaagggcaatacctgagggagggggaatgctggttggatgggaagggaggggcgttatacaccttcgtggggccagtgctggccatcataggcgtgaatgggctggtactagccatggccatgctgaagttgctgagaccttcgctgtcagagggacccccagcagagaagcgccaagctctgctgggggtgatcaaagccctgctcattcttacacccatctttggcctcacctgggggctgggcctggccactctgttagaggaagtctccacggtccctcattacatcttcaccattctcaacaccctccagggcgtcttcatcctattgtttggttgcctcatggacaggaagatacaagaagctttgcgcaaacgcttctgccgcgcccaagcccccagctccaccatctccctggccacaaatgaaggctgcatcttggaacacagcaaaggaggaagcgacactgccaggaagacagatgcttcagagtga

SEQ ID NO: 254 - protein, 826 aa, Homo sapiens
MPGDTLSLTLHLSQEATNLSWFLRHPGSPSPILLQPGTQVSVTSSHGQAALSVSNMSHHWAGEYMSCFEAQGFKWNLYEVVRVPLKATDVARLPYQLSISCATSPGFQLSCCIPSTNLAYTAAWSPGEGSKASSFNESGSQCFVLAVQRCPMADTTYTCDLQSLGLAPLRVPISITIIQDGDITCPEDASVLTWNVTKAGHVAQAPCPESKRGIVRRLCGADGVWGPVHSSCTDARLLALFTRTKLLQAGQGSPAEEVPQILAQLPGQAAEASSPSDLLTLLSTMKYVAKVVAEARIQLDRRALKNLLIATDKVLDMDTRSLWTLAQARKPWAGSTLLLAVETLACSLCPQDYPFAFSLPNVLLQSQLFGPTFPADYSISFPTRPPLQAQIPRHSLAPLVRNGTEISITSLVLRKLDHLLPSNYGQGLGDSLYATPGLVLVISIMAGDRAFSQGEVIMDFGNTDGSPHCVFWDHSLFQGRGGWSKEGCQAQVASASPTAQCLCQHLTAFSVLMSPHTVPEEPALALLTQVGLGASILALLVCLGVYWLVWRVVVRNKISYFRHAALLNMVFCLLAADTCFLGAPFLSPGPRSPLCLAAAFLCHFLYLATFFWMLAQALVLAHQLLFVFHQLAKHRVLPLMVLLGYLCPLGLAGVTLGLYLPQGQYLREGECWLDGKGGALYTFVGPVLAIIGVNGLVLAMAMLKLLRPSLSEGPPAEKRQALLGVIKALLILTPIFGLTWGLGLATLLEEVSTVPHYIFTILNTLQGVFILLFGCLMDRKIQEALRKRFCRAQAPSSTISLATNEGCILEHSKGGSDTARKTDASE

SEQ ID NO: 255 - DNA, 3207 bp, Homo sapiens
tgcagttcttccttgcggaaaatttgcatcgtgggcttgtagggactgtttcattgagccatggtctgttcggctgccccactgctgctcctggccacaactcttcccctgctggggtcaccagttgcccaagcatcccaacctggacagagtcaggctggaggggaatctggatctgggcagctcctggaccaagagaatggagcaggggaatcagcgctggtctccgtctatgtacatctggactttccagataagacctggccccctgaactctccaggacactgactctccctgctgcctcagcttcctcttccccaaggcctcttctcactggcctcagactcacaacagagtgtaatgtcaaccacaaggggaatttctattgtgcttgcctctctggctaccagtggaacaccagcatctgcctccattaccctccttgtcaaagcctccacaaccaccagccttgtggctgccttgtcttcagccatcccgaacccgggtactgccagttgctgccacctgtccccgggatcctcaacctgaactcccagctgcagatgcctggtgacacgctgagcctgactctccatctgagccaggaggccaccaacctgagctggttcctgaggcacccagggagccccagtcccatcctcctgcagccagggacacaggtgtctgtgacttccagccacggccaggctgccctcagcgtctccaacatgtcccatcactgggcaggtgagtacatgagctgcttcgaggcccagggcttcaagtggaacctgtatgaggtggtgagggtgcccttgaaggcgacagatgtggctcgacttccataccagctgtccatctcctgtgccacctcccctggcttccagctgagctgctgcatccccagcacaaacctggcctacaccgcggcctggagccctggagagggcagcaaagcttcctccttcaacgagtcaggctctcagtgctttgtgctggctgttcagcgctgcccgatggctgacaccacgtacacttgtgacctgcagagcctgggcctggctccactcagggtccccatctccatcaccatcatccaggatggagacatcacctgccctgaggacgcctcggtgctcacctggaatgtcaccaaggctggccacgtggcacaggccccatgtcctgagagcaagaggggcatagtgaggaggctctgtggggctgacggagtctgggggccggtccacagcagctgcacagatgcgaggctcctggccttgttcactagaaccaagctgctgcaggcaggccagggcagtcctgctgaggaggtgccacagatcctggcacagctgccagggcaggcggcagaggcaagttcaccctccgacttactgaccctgctgagcaccatgaaatacgtggccaaggtggtggcagaggccagaatacagcttgaccgcagagccctgaagaatctcctgattgccacagacaaggtcctagatatggacaccaggtctctgtggaccctggcccaagcccggaagccctgggcaggctcgactctcctgctggctgtggagaccctggcatgcagcctgtgcccacaggactaccccttcgccttcagcttacccaatgtgctgctgcagagccagctgtttggacccacgtttcctgctgactacagcatctccttccctactcggcccccactgcaggctcagattcccaggcactcactggccccattggtccgtaatggaactgaaataagtattactagcctggtgctgcgaaaactggaccaccttctgccctcaaactatggacaagggctgggggattccctctatgccactcctggcctggtccttgtcatttccatcatggcaggtgaccgggccttcagccagggagaggtcatcatggactttgggaacacagatggttcccctcactgtgtcttctgggatcacagtctcttccagggcagggggggttggtccaaagaagggtgccaggcacaggtggccagtgccagccccactgctcagtgcctctgccagcacctcactgccttctccgtcctcatgtccccacacactgttccggaagaacccgctctggcgctgctgactcargtgggcttgggagcttccatactggcgctgcttgtgtgcctgggtgtgtactggctggtgtggagagtcgtggtgcggaacaagatctcctatttccgccacgccgccctgctcaacatggtgttctgcttgctggccgcagacacttgcttcctgggcgccccattcctctctccagggccccgaagcccgctctgccttgctgccgccttcctctgtcatttcctctacctggccacctttttctggatgctggcgcaggccctggtgttggcccaccagctgctctttgtctttcaccagctggcaaagcaccgagttctccccctcatggtgctcctgggctacctgtgcccactggggttggcaggtgtcaccctggggctctacctacctcaagggcaatacctgagggagggggaatgctggttggatgggaagggaggggcgttatacaccttcgtggggccagtgctggccatcataggcgtgaatgggctggtactagccatggccatgctgaagttgctgagaccttcgctgtcagagggacccccagcagagaagcgccaagctctgctgggggtgatcaaagccctgctcattcttacacccatctttggcctcacctgggggctgggcctggccactctgttagaggaagtctccacggtccctcattacatcttcaccattctcaacaccctccagggcgtcttcatcctattgtttggttgcctcatggacaggaagatacaagaagctttgcgcaaacgcttctgccgcgcccaagcccccagctccaccatctccctggccacaaatgaaggctgcatcttggaacacagcaaaggaggaagcgacactgccaggaagacagatgcttcagagtgaaccacacacggacccatgttcctgcaagggagttgaggctgtgtgcttgaacccaccagatgagccctggcccaatgctctgaactcttcccgcctcccggagctcagcccttgagaaaggcaggcttatatttcccttagtgacactcatttatcttacag

SEQ ID NO: 256 - DNA, 1008 bp, Homo sapiens
  CDS (1)...(1008)
atgcagccgtccccgccgcccaccgagctggtgccgtcggagcgcgccgtggtgctgctgtcgtgcgcactctccgcgctcggctcgggcctgctggtggccacgcacgccctgtggcccgacctgcgcagccgggcacggcgcctgctgctcttcctgtcgctggccgacctgctctcggccgcctcctacttctacggagtgctgcagaacttcgcgggcccgtcgtgggactgcgtgctgcagggcgcgctgtccaccttcgccaacaccagctccttcttctggaccgtggccattgcgctctacttgtacctcagcatcgtccgcgccgcgcgcgggcctcgcacagatcgcctgctttgggccttccatgtcgtcagctggggggtcccgttggtcatcactgtggcagccgtcgccctgaagaagattggctatgacgcctcggacgtgtctgtgggctggtgctggatcgacctggaggccaaggaccatgtcctgtggatgctgctgacggggaagctgtgggagatgctggcatatgtgctgctgcctctgctgtacctcctggtccggaagcacatcaacagagcgcacacggcactctctgagtaccggcccatcctctcccaggagcaccgcctgctgcgccactcctccatggcggacaagaagctggtgctcatcccgctcatcttcatcggcctcagggtctggagcaccgtgcggttcgtgctgaccctctgtggctccccggccgtgcagacgccggtgctggtggttctgcatggtatcgggaacacgtttcagggaggtgccaactgcatcatgttcgtcctctgcacccgcgccgtccgaactcggctcttctctctctgttgctgctgctgctcttctcagcctcccaccaagagcccggctggcactcccaaggctcccgcgccttccaagccaggagaatctcaggaatcccaagggaccccaggggaacttccaagcacctga

SEQ ID NO: 257 - protein, 335 aa, Homo sapiens
MQPSPPPTELVPSERAVVLLSCALSALGSGLLVATHALWPDLRSRARRLLLFLSLADLLSAASYFYGVLQNFAGPSWDCVLQGALSTFANTSSFFWTVAIALYLYLSIVRAARGPRTDRLLWAFHVVSWGVPLVITVAAVALKKIGYDASDVSVGWCWIDLEAKDHVLWMLLTGKLWEMLAYVLLPLLYLLVRKHINRAHTALSEYRPILSQEHRLLRHSSMADKKLVLIPLIFIGLRVWSTVRFVLTLCGSPAVQTPVLVVLHGIGNTFQGGANCIMFVLCTRAVRTRLFSLCCCCCSSQPPTKSPAGTPKAPAPSKPGESQESQGTPGELPST
